(19) United States
(12) Patent Application Publication
(10) Pub. No.: US 2005/0054826 A1
(43) Pub. Date: Mar. 10, 2005

(54) Human diaphanous-3 gene and methods of use therefor

(75) Inventor: Mao Mao, Redmond, WA (US)

Correspondence Address: JONES DAY, 222 EAST 41ST ST, NEW YORK, NY, 10017, US

(73) Assignee: Rosetta Inpharmatics LLC

(21) Appl. No.: 10/848,755

(22) Filed: May 18, 2004

Related U.S. Application Data
(60) Provisional application No. 60/471,842, filed on May 19, 2003.

(51) Int. Cl. C07K 14/705; C07H 21/04

(52) U.S. Cl. 530/350; 536/23.5; 435/69.1; 435/320.1; 435/325

(57) ABSTRACT

The present invention is directed to the full-length cDNA sequence encoding human diaphanous-3 (DIAPH3), to DIAPH3 encoded thereby, and to fragments of DIAPH3 and the cDNA. The present invention also provides for the use of the cDNA, and of DIAPH3, as a marker of poor prognosis of breast cancer. Because DIAPH3 appears essential for proper spindle pole formation during mitosis, DIAPH3 is a useful target for screening assays designed to identify inhibitors or modulators of DIAPH3 activity, which are useful for the treatment of cancer, particularly breast cancer. Thus, the invention further provides methods of using DIAPH3, or fragments thereof, in assays to identify such compounds.

[0001] This application claims benefit of U.S. Provisional Application Ser. No. 60/471,842, filed May 19, 2003, which is hereby incorporated by reference herein in its entirety.

[0002] This application includes a Sequence Listing submitted on compact disc, recorded on two compact discs, including one duplicate, containing Filename 9301196999.txt, of size 622,060 bytes, created May 14, 2004. The sequence listing on the compact discs is incorporated by reference herein in its entirety.

### 1. FIELD OF THE INVENTION

[0003] The present invention relates to the identification of the full-length sequence of a human breast cancer-related cDNA referred to herein as DIAPH3. The invention specifically relates to the nucleotide sequence of the DIAPH3 cDNA, and subsequences thereof, and to the encoded DIAPH3 protein and analogs thereof. The invention further relates to the use of the DIAPH3 cDNA in the prognosis of breast cancer. The invention also relates to the use of the DIAPH3 cDNA, the coding sequences thereof, or the DIAPH3 protein as a target for anti-cancer drugs, and in methods for the identification of molecules that have anti-cancer activity.

### 2. BACKGROUND OF THE INVENTION

### 2.1 Breast Cancer

[0004] The increased number of cancer cases reported in the United States, and, indeed, around the world, is a major concern. Currently there is only a handful of treatments available for specific types of cancer, and these provide no guarantee of success. In order to be most effective, these treatments require not only an early detection of the malignancy, but a reliable assessment of the severity of the malignancy.

[0005] The incidence of breast cancer, a leading cause of death in women, has been gradually increasing in the United States over the last thirty years. Its cumulative risk is relatively high; 1 in 8 women are expected to develop some type of breast cancer by age 85 in the United States. In fact, breast cancer is the most common cancer in women and the second most common cause of cancer death in the United States. In 1997, it was estimated that 181,000 new cases were reported in the U.S., and that 44,000 people would die of breast cancer (Parker et al., CA Cancer J. Clin. 47:5-27 (1997); Chu et al., J. Nat. Cancer Inst. 88:1571-1579 (1996)). While the mechanism of tumorigenesis for most breast carcinomas is largely unknown, there are genetic factors that can predispose some women to developing breast cancer (Miki et al., Science, 266:66-71(1994)). The discovery and characterization of BRCA1 and BRCA2 has recently expanded our knowledge of genetic factors which can contribute to familial breast cancer. Germ-line mutations within these two loci are associated with a 50 to 85% lifetime risk of breast and/or ovarian cancer (Casey, Curr. Opin. Oncol. 9:88-93 (1997); Marcus et al., Cancer 77:697-709 (1996)). Only about 5% to 10% of breast cancers are associated with breast cancer susceptibility genes, BRCA1 and BRCA2. The cumulative lifetime risk of breast cancer for women who carry the mutant BRCA1 is predicted to be approximately 92%, while the cumulative lifetime risk for the non-carrier majority is estimated to be approximately 10%. BRCA1 is a tumor suppressor gene that is involved in DNA repair and cell cycle control, which are both important for the maintenance of genomic stability. More than 90% of all mutations reported so far result in a premature truncation of the protein product with abnormal or abolished function. The histology of breast cancer in BRCA1 mutation carriers differs from that in sporadic cases, but mutation analysis is the only way to find the carrier. Like BRCA1, BRCA2 is involved in the development of breast cancer, and like BRCA1 plays a role in DNA repair. However, unlike BRCA1, it is not involved in ovarian cancer.

[0006] Other genes have been linked to breast cancer, for example c-erb-2 (HER2) and p53 (Beenken et al., Ann. Surg. 233(5):630-638 (2001). Overexpression of c-erb-2 (HER2) and p53 have been correlated with poor prognosis (Rudolph et al., Hum. Pathol. 32(3):311-319 (2001), as has been aberrant expression products of mdm2 (Lukas et al., Cancer Res. 61(7):3212-3219 (2001) and cyclin1 and p27 (Porter & Roberts, International Publication WO98/33450, published Aug. 6, 1998). However, no other clinically useful markers consistently associated with breast cancer have been identified.

[0007] Sporadic tumors, those not currently associated with a known germline mutation, constitute the majority of breast cancers. It is also likely that other, non-genetic factors also have a significant effect on the etiology of the disease. Regardless of the cancer's origin, breast cancer morbidity and mortality increases significantly if it is not detected early in its progression. Thus, considerable effort has focused on the early detection of cellular transformation and tumor formation in breast tissue, and the nucleotide sequences of breast cancer-related genes or the cDNAs derived therefrom. The present application provides one such sequence.

### 2.2 Diaphanous Proteins and Tumorigenesis

[0008] The misregulation of genes associated with cell-cycle control and cytoskeletal restructuring have been implicated in the etiology of various cancers.

[0009] A group of small GTP-binding proteins (G-proteins) with molecular weights of 20,000-30,000 with no subunit structure has been observed in various organisms. To date, over fifty or more members have been found as the superfamily of the small G-proteins in a variety of organisms, from yeast to mammals. The group of small G-proteins includes the Rho protein, which is considered to control cell morphological change, adhesion and motility. When the inactive GDP-binding Rho is stimulated, it is transformed to the active GTP-binding Rho protein by GDP/GTP exchange proteins such as Smg GDS, Dbl or Ost. The activated Rho protein then acts on target proteins to form stress fibers and focal contacts, thus inducing the cell adhesion and motility (Takai et al., Trends Biochem. Sci., 20:227-231 (1995)). Rho is also considered to be implicated in physiological functions associated with cytoskeletal rearrangements, such as cell morphological change (Parterson et al., J. Cell Biol., 111:1001-1007 (1990)), cell adhesion (Morii et al., J. Biol. Chem. 267:20921-20926 (1992); Tominaga et al., J. Cell Biol. 120:1529-1537 (1993); Nusrat et al., Proc. Natl. Acad. Sci. U.S.A. 92:10629-10633 (1995); Landanna et al., Science 271:981-983 (1996)), cell motility (Takaishi et al., Oncogene 9:273-279 (1994)); cytokinesis (Kishi et al., J. Cell Biol. 120:1187-1195 (1993); and metastasis (Yoshioka et al., FEBS Lett., 372:25-28 (1995)). Rho exerts its effects on the actin cytoskeleton, which plays an important role in cell motility, morphology, phagocytosis and cytokinesis.

[0010] Formin homology domain proteins have also been implicated in the control of rearrangements of the actin cytoskeleton, especially in the context of cytokinesis and cell polarization. See Ridley, Nature Cell Biol. 1:E64-E66 (1999). Members of this family have been shown to interact with Rho-GTPases (Alberts, J. Biol. Chem. 276(4):2824-2830 (2001); Tominaga et al., Mol. Cell 5:13-25 (2000)), profilin, and other actin-associated proteins. These interactions are mediated by a proline-rich FH1 domain, usually located in front of the FH2 domain.

[0011] One group of formin homology domain proteins, related to the D. melanogaster Diaphanous protein, have been identified in mouse and in humans. The murine homolog of Diaphanous, Dia, interacts with Rho GTPase to effect cytoskeletal rearrangements. See U.S. Pat. No. 6,111,072. In mouse, a variant of the gene dia, showing limited nucleotide sequence homology to the D. melanogaster dia gene, has been shown to be expressed in osteosarcoma cells. See Fukuda et al., Biochem. Biophys. Res. Comm. 261(1):35-40 (1999)).

[0012] In humans, two dia-like genes have been identified. The gene encoding the FH protein DIA has been implicated in premature ovarian failure (Bione et al., Am. J. Hum. Genet. 62:533-541 (1998)), and the related DFNA1 gene has been implicated in nonsyndromic deafness in a large Costa Rican kindred (Lynch et al., Science 278:1315-1318 (1997); see also U.S. Pat. No. 6,197,932; U.S. Pat. No. 5,985,574; U.S. Pat. No. 6,111,072). The DIAPH3 sequence described herein, and the DIAPH3 protein encoded thereby, constitute a third class of human dia-like sequence. Prior to the present invention, no connection had been demonstrated in humans between a diaphanous-like protein and breast cancer.

### 3. SUMMARY OF THE INVENTION

[0013] The present invention provides a DIAPH3 protein and fragments thereof. In one embodiment, the invention provides a purified protein comprising the C-terminal 60 contiguous amino acids of SEQ ID NO: 3, wherein said purified protein displays the antigenicity or immunogenicity of SEQ ID NO: 3. In a specific embodiment, said protein comprises the C-terminal 500 amino acids of SEQ ID NO: 3. In another specific embodiment, said protein comprises SEQ ID NO: 3. In another specific embodiment, said protein comprises amino acids 636-1110 of SEQ ID NO: 3. In another specific embodiment, said purified protein consists of less than the entire amino acid sequence of SEQ ID NO: 3.

[0014] The invention also provides DIAPH3-encoding nucleic acids and fragments thereof. Thus, in another embodiment, the invention provides an isolated nucleic acid comprising 3750 contiguous nucleotides of SEQ ID NO: 1, or the complement thereof. In specific embodiment, said isolated nucleic acid comprises 500 contiguous nucleotides of the 3′ end of SEQ ID NO: 1, or the complement thereof. In another specific embodiment, said isolated nucleic acid comprises the nucleotide sequence of SEQ ID NO: 1, or the complement thereof. In another specific embodiment, the isolated nucleic acid is DNA. In another embodiment, the invention provides an isolated nucleic acid comprising a nucleotide sequence encoding a protein the amino acid sequence of which consists of SEQ ID NO: 3, or a protein comprising the C-terminal contiguous amino acids of SEQ ID NO: 3, wherein said protein displays the antigenicity or immunogenicity of SEQ ID NO: 3, or the complement of said nucleotide sequence. In another embodiment, the invention provides a cell transformed with a nucleic acid, said nucleic acid comprising (a) a nucleotide sequence encoding a protein comprising the C-terminal 100 contiguous amino acids of SEQ ID NO: 3, wherein said protein displays the antigenicity or immunogenicity of SEQ ID NO: 3, or (b) the complement of said nucleotide sequence. In another embodiment, the invention provides a recombinant cell containing a nucleic acid comprising 3750 contiguous nucleotides of SEQ ID NO: 1, or the complement thereof, in which the nucleotide sequence is under the control of a promoter heterologous to the nucleotide sequence. In a specific embodiment, this nucleic acid is contained within a vector.

[0015] The invention also provides antibodies to a DIAPH3 protein or fragments thereof. In one embodiment, the invention provides an antibody that specifically binds to a protein the amino acid sequence of which consists of SEQ ID NO: 3. In specific embodiment, said antibody is monoclonal. In another embodiment, the invention provides a molecule comprising a fragment of the antibody of claim 14, which fragment binds said protein. In another embodiment, said antibody specifically binds an epitope present in amino acids 1110-1152 of SEQ ID NO: 3.

[0016] The invention further provides a method of producing a protein comprising growing a recombinant cell containing a nucleic acid that encodes a protein comprising SEQ ID NO: 3, or a protein comprising the C-terminal 100 contiguous amino acids of SEQ ID NO: 3, in which said nucleotide sequence is under the control of a promoter heterologous to said nucleotide sequence, such that the protein encoded by said nucleic acid is expressed by the cell; and recovering said expressed protein. The invention also provides an isolated protein that is the product of this method.

[0017] The invention further provides pharmaceutical composition comprising a therapeutically effective amount of a purified protein comprising SEQ ID NO: 3, or a protein comprising the C-terminal 100 contiguous amino acids of SEQ ID NO: 3, and a pharmaceutically acceptable carrier. In another embodiment, the invention provides a pharmaceutical composition comprising a therapeutically effective amount of the nucleic acid comprising 3750 contiguous nucleotides of SEQ ID NO: 1, or a nucleic acid encoding a protein comprising SEQ ID NO: 3, or a protein comprising the C-terminal 100 contiguous amino acids of SEQ ID NO: 3; and a pharmaceutically acceptable carrier. In another embodiment, the invention provides a pharmaceutical composition comprising a therapeutically effective amount of an antibody that specifically binds to a protein the amino acid sequence of which that consists of SEQ ID NO: 3, or specifically binds to an epitope present in amino acids 1110-1152 of SEQ ID NO: 3, and a pharmaceutically acceptable carrier.

[0018] The invention further provides a method of identifying an agent that modulates the binding of a protein comprising SEQ ID NO: 3 to a binding partner, comprising contacting said protein and said binding partner with an agent; and measuring an amount of a complex comprising said protein and said binding partner in the presence of said agent, wherein if said amount differs from said amount in the absence of said agent, said agent is identified as an agent that modulates the binding of said protein to said binding partner. In a specific embodiment, said protein comprising SEQ ID NO: 3 is purified. In a specific embodiment, said agent, or said binding partner is purified. The invention further provides a method of identifying a molecule that binds to a ligand, comprising: (a) contacting a ligand with one or more candidate binding molecules under conditions conducive to binding between said ligand and said molecules, wherein said ligand is selected from the group consisting of a first protein comprising SEQ ID NO: 3, a second protein comprising a fragment of SEQ ID NO: 3 comprising the FH2 domain of DIAPH3 but less than all of SEQ ID NO: 3, and a nucleic acid encoding said first protein or said second protein; and (b) identifying any of said molecules that specifically binds to said ligand. In a specific embodiment, said first protein or said second protein is purified. In a specific embodiment, said molecule is an antibody or a small molecule.

[0019] The present invention further provides methods of diagnosis and prognosis of breast cancer using the nucleic acids, proteins or antibodies of the invention. In one embodiment, the invention provides a method of diagnosing an individual as having breast cancer, comprising comparing the level of expression of a nucleic acid encoding SEQ ID NO: 3 in a sample derived from breast cells of said individual to a control level of said expression, and diagnosing said individual as having breast cancer if said level of expression of said nucleic acid encoding SEQ ID NO: 3 is higher than said control level of expression. In a specific embodiment, said level of expression of a nucleic acid encoding SEQ ID NO: 3 is determined by hybridizing said nucleic acid with an oligonucleotide complementary and hybridizable to nucleotides 1-862, 2927-3045, or 3412-3929 of SEQ ID NO: 1, and determining the amount of said hybridization. In another embodiment, the invention provides a method of diagnosing an individual as having breast cancer comprising comparing the level of a protein the amino acid sequence of which consists of SEQ ID NO: 3 in a sample derived from breast cells of said individual to a control level of said protein; and classifying said individual as having breast cancer if said level of said protein in said sample is higher than said control level of said protein. The invention also provides a method of imaging a breast cancer tumor comprising: (a) contacting cells of said tumor with an antibody that binds specifically to a protein the amino acid sequence of which consists of SEQ ID NO: 3, wherein said antibody is labeled; and (b) detecting said label. The invention further provides a method of predicting the prognosis of a breast cancer patient comprising: (a) determining the level of expression of a nucleic acid encoding SEQ ID NO: 3 in a sample derived from breast cancer tumor cells from said patient; (b) comparing said level of expression to a control level of said expression; and (c) predicting that said patient will have a poor prognosis if said level of expression of said nucleic acid encoding SEQ ID NO: 3 in said sample is higher than said control level of said expression. In a specific embodiment, said level of expression of a nucleic acid encoding SEQ ID NO: 3 is determined by hybridizing said nucleic acid with an oligonucleotide complementary and hybridizable to nucleotides 1-862, 2927-3045, or 3412-3929 of SEQ ID NO: 1, and determining the amount of said hybridization. In another specific embodiment, said determining is carried out by a method comprising: (a) hybridizing nucleic acids in said sample to an oligonucleotide, wherein said oligonucleotide is hybridizable to SEQ ID NO: 1 or its complement; and (b) determining the amount of said hybridization. In a more specific embodiment, said oligonucleotide is a probe on a microarray. In another more specific embodiment, said oligonucleotide is one of a plurality of probes on a microarray, wherein said plurality comprises probes complementary and hybridizable to nucleic acids respectively encoded by five different breast cancer-related markers that do not encode SEQ ID NO: 3. In another more specific embodiment, said oligonucleotide is one of a plurality of probes on a microarray, wherein said plurality comprises probes complementary and hybridizable to nucleic acids respectively encoded by twenty different breast cancer-related markers that do not encode SEQ ID NO: 3. In an even more specific embodiment, said five different breast cancer-related markers are present in Table 1. In another even more specific embodiment, said five different breast cancer-related markers are present in Table 2. The invention also provides a method of predicting the prognosis of a breast cancer patient comprising: (a) determining the level of a protein comprising SEQ ID NO: 3 in a sample derived from breast cancer tumor cells from said patient; (b) comparing said level of said protein to a control level of said protein; and (c) predicting that said patient will have a poor prognosis if said level of said protein comprising SEQ ID NO: 3 is significantly higher than said control level of said protein. In a specific embodiment, said determining is carried out by a method comprising: (a) contacting said protein comprising SEQ ID NO: 3 from said sample with an antibody that specifically binds said protein; and (b) determining the amount of antibody bound to said protein, wherein said amount of antibody bound to said protein indicates said level of said protein in said breast cancer tumor sample.

[0020] The present invention also provides kits useful for the detection, diagnosis and/or prognosis of breast cancer. In one embodiment, the invention provides a kit comprising in a first container an oligonucleotide that hybridizes to SEQ ID NO: 1 under stringent conditions, wherein said oligonucleotide is at least 12 nucleotides in length, and wherein said oligonucleotide is complementary and hybridizable to nucleotides 1-862, 2927-3045, or 3412-3929 of SEQ ID NO: 1. In another embodiment, the invention provides a kit for the diagnosis and/or prognosis of breast cancer, comprising in a first container an oligonucleotide that hybridizes to a nucleotide sequence that encodes SEQ ID NO: 3 under stringent conditions, wherein said oligonucleotide is at least 12 nucleotides in length, and wherein said oligonucleotide is complementary and hybridizable to nucleotides 1-862, 2927-3045, or 3412-3929 of SEQ ID NO: 1, and further comprising in a second container a known amount of a nucleic acid to which said oligonucleotide is complementary and hybridizable. In a specific embodiment, said oligonucleotide is a probe on a microarray. In a more specific embodiment, said microarray comprises probes complementary and hybridizable to nucleic acids respectively encoded by breast cancer-related markers other than a nucleotide sequence that encodes SEQ ID NO: 3. The invention also provides an article of manufacture comprising a container comprising a purified protein comprising SEQ ID NO: 3. The invention further provides a kit comprising in a first container an antibody that specifically binds to a protein the amino acid sequence of which consists of SEQ ID NO: 3, or binds specifically to a fragment of said protein, and further comprising in a second container a known amount of said protein or a fragment thereof to which said antibody binds. In a specific embodiment, said antibody specifically binds an epitope present in amino acids 1110-1152 of SEQ ID NO: 3. In another embodiment, the invention provides a kit comprising in one or more containers a forward primer and a reverse primer that amplify at least a portion of the nucleotide sequence of SEQ ID NO: 1 when used in a polymerase chain reaction, wherein said forward primer and said reverse primer are complementary and hybridizable to nucleotides 1-862, 2927-3045, or 3412-3929 of SEQ ID NO: 1 or the complementary sequence thereof.

[0021] The invention also provides a method of inhibiting the expression of a nucleotide sequence encoding SEQ ID NO: 3 comprising contacting an RNA encoding SEQ ID NO: 3 with an interfering RNA, said interfering RNA comprising a nucleotide sequence complementary and hybridizable to SEQ ID NO: 1, under conditions that allow said interfering RNA and said mRNA to hybridize. In a specific embodiment, said nucleotide sequence of said interfering RNA, or a complement thereof, is present within nucleotides 1-862, 2927-3045, or 3412-3929 of SEQ ID NO: 1. In another specific embodiment, said nucleotide sequence of said interfering RNA is selected from the group consisting of SEQ ID NO: 274 and SEQ ID NO: 275.

### 3.1 Definitions

[0022] As used herein, italicization indicates a nucleotide sequence such as a gene or cDNA sequence and roman type indicates the encoded protein or polypeptide. For example, “DIAPH3” shall mean a cDNA, or the gene from which the cDNA is derived, encoding the protein product “DIAPH3.” “DIAPH3” and DIAPH3 refer not only to the human nucleotide sequence and protein, respectively, but to homologs of each from other species.

[0023] “Breast cell” as used herein indicates any cell normally associated with the breast, or which the breast comprises, including epithelial and endothelial cells, fat cells, duct cells, etc.

[0024] “Protein” as used herein includes peptides and polypeptides.

### 4. BRIEF DESCRIPTION OF THE DRAWINGS

[0025] FIGS. 1A-1B depict the full-length sequence of the 4331 nucleotide DIAPH3 cDNA (SEQ ID NO: 1).

[0026] FIG. 2A-2C depict the coding region (SEQ ID NO: 2) of the DIAPH3 cDNA sequence aligned to the amino acid sequence of the predicted DIAPH3 protein product (SEQ ID NO: 3) encoded thereby. The nucleotide sequence of SEQ ID NO: 2 is nucleotides 93-3551 of SEQ ID NO: 1.

[0027] FIG. 3 depicts the UCSC linkage map of a region of chromosome 13q21.2 containing poor breast cancer prognosis markers AL137718, Contig28552 and Contig46218 (University of California-Santa Cruz, April, 2002 freeze). Specific features presented in the linkage map are as follows. “Base Position”: Chromosomal coordinates, numbered from the telomere of the short arm of human chromosome 13. “Chromosome Band”: Light and dark blocks show traditional cytological bands seen with Giemsa staining. STS Markers: Location of markers from genetic, RH, YAC, and FISH maps. “Gap”: Shows locations of gaps in the assembly with black boxes or vertical lines. Small gaps may have artefactually coalesced in the graphic. Gaps spanned by mRNA and paired reads have a white horizontal line through the black box to indicate bridging. “Coverage”: In dense display, the level of gray gives level of coverage: White/Clear: no coverage (gap); Light Gray: predraft (less than 4× shotgun); Medium Gray: draft (at least 4× shotgun); Dark Gray: multiple draft, covered by more than one draft clone; Finished: covered by a finished clone. “YourSeq”: Position of the query DNA sequence relative to other sequences or features in the linkage map. “Known Genes (from RefSeq)”: Known protein-coding genes from LocusLink. Exons are represented by black boxes; thin horizontal lines represent introns. In the full view, the arrows on the introns indicate direction of transcription. “Acembly Gene Predictions with Alt Splicing”: Gene models reconstructed solely from mRNA and EST evidence by Danielle and Jean Thierry-Mieg and Vahan Simonyan using the Acembly program. “Genscan Gene Predictions”: Gene predictions using the program Genscan, which uses predictions are based on transcriptional, translational, and donor and acceptor splicing signals, plus length and compositional distributions of exons, introns and intergenic regions. “Human mRNAs from Genbank”: Alignments between human mRNAs in Genbank and the genome using the BLAT program. “Human ESTs That Have Been Spliced”: Alignments between spliced Expressed Sequence Tags (ESTs) in Genbank and the genome using the BLAT program. “Nonhuman mRNAs from Genbank”: Translated BLAT alignments of non-human vertebrate mRNA from Genbank. “Overlap SNPs”: Single nucleotide polymorphisms found on overlapping contigs. “Random SNPs”: Displays single nucleotide polymorphisms (SNPs) found by random sequencing. “RepeatMasker”: Shows dispersed repeats as determined by RepeatMasker using the Repbase Update library of repetitive sequences from the Genetic Information Research Institute. These elements include SINE, LINE, LTR, DNA, simple, low complexity, micro-satellite, tRNA, and other repeat families.

[0028] FIG. 4 depicts array data demonstrating that the expression of DIAPH3 clusters with, or is co-regulated with, the expression of other genes associated with mitosis-related genes.

[0029] FIG. 5 depicts the percentage of living cells present after treatment with DIAPH3-derived small interfering RNAs (siRNAs) DIAPH3-1555 or DIAPH3-1805, as compared to an siRNA for luciferase. Cells were transfected with a luciferase siRNA, DIAPH3-1555 or DIAPH3-1805, or were mock-transfected, grown for 72 hours, and stained with crystal violet.

[0030] FIGS. 6A-6C depict experiments demonstrating the effect of disruption of DIAPH3 expression on mitotic spindle pole formation. FIG. 6A depicts a mock-treated HeLa cell in mitosis, showing normal dipolar mitotic spindle formation. FIG. 6B depicts aberrant tripolar (top) and quadripolar (bottom) mitotic spindle formation when HeLa cells are transfected with the siRNA DIAPH3-1555. FIG. 6C depicts aberrant tripolar (top) and quadripolar (bottom) mitotic spindle formation when HeLa cells are transfected with the siRNA DIAPH3-1803.

[0031] FIG. 7 depicts results of experiments to determine the percentage of mitotic HeLa cells displaying aberrant mitotic spindle formation, where the cells were transfected with a luciferase siRNA, the siRNAs DIAPH3-1555 or DIAPH3-1805, or were mock-transfected. Percentages indicate the percent of cells showing aberrant spindle formation out of all cells in culture identified as mitotic.

[0032] FIGS. 8A-8C depict light micrographs demonstrating multinucleation resulting from disruption of DIAPH3 expression. FIG. 7A depicts mock-transfected HeLa cells that are normally nucleated. FIG. 7B depicts HeLa cells transfected with DIAPH3-1555. The cells display an abnormal, multinucleate physiology. FIG. 7C depicts HeLa cells transfected with DIAPH3-1805. The cells display an abnormal, multinucleate physiology.

[0033] FIG. 9 depicts the percentages of cells showing micronucleation or multinucleation resulting from transfection with DIAPH3 siRNAs DIAPH3-1555 or DIAPH3-1805. The percentage of cells, indicated on the Y-axis, is the percentage of cells counted that display multinucleation (light gray bars) or micronucleation (dark gray bars).

### 5. DETAILED DESCRIPTION OF THE INVENTION

[0034] The present invention relates to the full-length human DIAPH3 cDNA and the DIAPH3 protein encoded thereby. SEQ ID NO: 1 is the full-length DIAPH3 cDNA sequence (FIG. 1), which includes the DIAPH3 coding sequence (SEQ ID NO: 2: FIG. 2) that encodes the DIAPH3 protein (SEQ ID NO: 3: FIG. 2). DIAPH3 is a formin homology domain (FH) protein, and is predicted to contain an FH2 domain between amino acid residues 636 and 1077, inclusive.

### 5.1 Isolation of DIAPH3 and DIAPH3-Related Genes

[0035] The invention first relates to the nucleotide sequence of DIAPH3. In a specific embodiment, the invention relates to the full-length DIAPH3 cDNA as presented in FIG. 1 (SEQ ID NO: 1). In another specific embodiment, the invention provides the coding or cDNA sequence of the DIAPH3 gene (FIG. 2; SEQ ID NO: 2) and the encoded DIAPH3 protein (FIG. 2; SEQ ID NO: 3). The nucleotide sequence of SEQ ID NO: 2 is nucleotides 93-3551 of SEQ ID NO: 1.

[0036] The invention provides purified nucleic acids consisting of at least 10 nucleotides (i.e., a hybridizable portion) of a nucleotide sequence encoding DIAPH3; in other embodiments, the nucleic acids consist of at least 10, 20, 50, 100, 150, 200, 300, 400, 500, 600, 700, 800, 900, 100, 1100, 1200, 1500, 2000, 2300, 2500, 3000, 3250, 3500, 3750 or 4000 contiguous nucleotides of a nucleotide sequence encoding DIAPH3. In another embodiment, the nucleic acids consist of at least the 10, 20, 50, 100, 150, 200, 300, 400, 500, 600, 700, 800, 900, 100, 1100, 1200, 1500, 2000, 2300, 2500, 3000, 3250, 3500, 3750 or 4000 contiguous nucleotides of the 3′ end of the nucleotide sequence of SEQ ID NO: 1. In another embodiment, the nucleic acids are smaller than 35, 200 or 500 nucleotides in length. Nucleic acids can be single or double stranded. In another embodiment, the nucleic acids comprise a sequence of at least 10 nucleotides that encode a fragment of DIAPH3, wherein the fragment of DIAPH3 displays one or more functional activities of DIAPH3, or contains a functional domain or motif of DIAPH3. In no event, however, does the invention provide for a contiguous nucleic acid sequence wholly contained within the sequence depicted in Genbank Accession No. AL137718, Contig28552 or Contig46218 (see Example 1).

[0037] The invention also relates to nucleic acids hybridizable to or complementary to the foregoing sequences. In specific aspects, nucleic acids are provided which comprise a sequence complementary to at least 20, 30, 40, 50, 100, or 200 nucleotides or the entire coding region of DIAPH3, or the reverse complement (antisense) of any of these sequences. In a specific embodiment, a nucleic acid which is hybridizable to DIAPH3 (e.g., having part or the whole of sequence SEQ ID NO: 1 or SEQ ID NO: 2, or the complement thereof), or to a nucleic acid encoding a DIAPH3 derivative, under conditions of low stringency is provided. By way of example and not limitation, procedures using such conditions of low stringency are as follows (see also Shilo and Weinberg, Proc. Natl. Acad. Sci. U.S.A. 78:6789-6792 (1981)): Filters containing DNA are pretreated for 6 h at 40° C. in a solution containing 35% formamide, 5×SSC, 50 mM Tris-HCl (pH 7.5), 5 mM EDTA, 0.1% PVP, 0.1% Ficoll, 1% BSA, and 500 μg/ml denatured salmon sperm DNA. Hybridizations are carried out in the same solution with the following modifications: 0.02% PVP, 0.02% Ficoll, 0.2% BSA, 100 μg g/ml salmon sperm DNA, 10% (wt/vol) dextran sulfate, and 5-20×10⁶ cpm ³²P-labeled probe is used. Filters are incubated in hybridization mixture for 18-20 h at 40° C., and then washed for 1.5 h at 55° C. in a solution containing 2×SSC, 25 mM Tris-HCl (pH 7.4), 5 mM EDTA, and 0.1% SDS. The wash solution is replaced with fresh solution and incubated an additional 1.5 h at 60° C. Filters are blotted dry and exposed for autoradiography. If necessary, filters are washed for a third time at 65-68° C. and re-exposed to film. Other conditions of low stringency which may be used are well known in the art (e.g., as employed for cross-species hybridizations).

[0038] In another specific embodiment, a nucleic acid hybridizable to a nucleic acid encoding DIAPH3, or its reverse complement, under conditions of high stringency is provided. By way of example and not limitation, procedures using such conditions of high stringency are as follows. Prehybridization of filters containing DNA is carried out for 8 h to overnight at 65° C. in buffer composed of 6×SSC, 50 mM Tris-HCl (pH 7.5), 1 mM EDTA, 0.02% PVP, 0.02% Ficoll, 0.02% BSA, and 500:g/ml denatured salmon sperm DNA. Filters are hybridized for 48 h at 65° C. in prehybridization mixture containing 100 μg/ml denatured salmon sperm DNA and 5-20×10⁶ cpm of ³²P-labeled probe. Washing of filters is done at 37° C. for 1 h in a solution containing 2×SSC, 0.01% PVP, 0.01% Ficoll, and 0.01% BSA. This is followed by a wash in 0.1×SSC at 50° C. for 45 min before autoradiography. Other conditions of high stringency that may be used are well known in the art. Nucleic acids hybridizable to the complement of the above-mentioned sequences are also provided.

[0039] The above-mentioned nucleic acids preferably also encode a protein displaying one or more functional activities of DIAPH3 or a domain or motif thereof.

[0040] Nucleic acids encoding derivatives of DIAPH3 (see Section 5.6), and antisense nucleic acids to sequences encoding DIAPH3 (see Section 5.9.2) are additionally provided. As is readily apparent, as used herein, a nucleic acid encoding a “fragment” or “portion” of DIAPH3 shall be construed as referring to a nucleic acid encoding only the recited fragment or portion of DIAPH3 and not the other contiguous portions of DIAPH3 as a continuous sequence.

[0041] Fragments of nucleic acids encoding DIAPH3, which comprise regions conserved between (i.e., having homology or identity to) other DIAPH3-encoding nucleic acids of the same or different species, are also provided. Nucleic acids encoding one or more domains of DIAPH3 are provided.

[0042] Fragments or derivatives of DIAPH3 that hybridize specifically to DIAPH3, and thus can be used as hybridization probes in hybridization assays to detect upregulation or downregulation of DIAPH3, are also provided. In such embodiments, oligonucleotides of at least 10, 15, 20, 25, 30, 35, 40, 45, 50, 60, 70, 80, 90 or 100 nucleotides are provided. In specific embodiments, oligonucleotides, preferably oligodeoxyribonucleotides, in the range of 10-100, 15-80, or 40-70 nucleotides are provided as hybridization probes. Oligoribonucleotides that hybridize specifically to DIAPH3 are also provided in the invention.

[0043] The invention also provides nucleic acids comprising nucleotide sequences of at least 60, 70, 90, 95 or 99% homologous to a nucleotide sequence of DIAPH3 or a portion thereof. “Homologous” means that in various embodiments, the aligned first nucleotide sequence has preferably at least 30% or 50%, more preferably 60% or 70%, even more preferably at least 80% or 90%, and even more preferably at least 95% identity to a second nucleotide sequence over a nucleotide sequence length equal to the shorter of the two sequences, plus any introduced gaps. When the alignment is done by a computer homology program known in the art, such as BLAST (blastn), the percent homology is calculated by dividing the number of nucleotides in the DIAPH3-encoding nucleic acid sequence or fragment thereof exactly matching the nucleotide at the same position in the aligned sequence by the length of the alignment in nucleotides, including introduced gaps, where introduced gaps count as mismatches.

[0044] Specific embodiments for the cloning of a gene or cDNA encoding DIAPH3, presented as a particular example but not by way of limitation, follows:

[0045] For expression cloning (a technique commonly known in the art), an expression library is constructed by methods known in the art. For example, mRNA (e.g., human) is isolated, cDNA is made and ligated into an expression vector (e.g., a bacteriophage derivative) such that it is capable of being expressed by the host cell into which it is then introduced. Various screening assays can then be used to select for the expressed DIAPH3 product. In one embodiment, anti-DIAPH3 antibodies can be used for selection.

[0046] In another embodiment of the invention, polymerase chain reaction (PCR) is used to amplify the desired sequence in a genomic or cDNA library, prior to selection. Oligonucleotide primers representing known DIAPH3-encoding sequences can be used as primers in PCR. In a preferred aspect, the oligonucleotide primers represent at least part of the conserved segments of strong homology between DIAPH3-encoding genes of different species, for example FH2 domains. The synthetic oligonucleotides may be utilized as primers to amplify by PCR sequences from RNA or DNA, preferably a cDNA library, of potential interest. Alternatively, one can synthesize degenerate primers for use in the PCR reactions.

[0047] In PCR according to the invention, the nucleic acid being amplified can include RNA or DNA, for example, mRNA, cDNA or genomic DNA from any eukaryotic species. PCR can be carried out, e.g., by use of a Perkin-Elmer Cetus thermal cycler and Taq polymerase. It is also possible to vary the stringency of hybridization conditions used in priming the PCR reactions, to allow for greater or lesser degrees of nucleotide sequence similarity between a known DIAPH3 nucleotide sequence and a nucleic acid homolog being isolated. For cross-species hybridization, low stringency conditions are preferred. For same-species hybridization, moderately stringent conditions are preferred. After successful amplification of a segment of a DIAPH3 homolog, that segment may be cloned, sequenced, and utilized as a probe to isolate a complete cDNA or genomic clone. This, in turn, will permit the determination of the gene's complete nucleotide sequence, the analysis of its expression, and the production of its protein product for functional analysis, as described infra. In this fashion, additional nucleotide sequences encoding DIAPH3 or DIAPH3 homologs may be identified.

[0048] The above recited methods are not meant to limit the following general description of methods by which clones of genes encoding DIAPH3 or homologs thereof may be obtained.

[0049] Any eukaryotic cell potentially can serve as the nucleic acid source for the molecular cloning of the DIAPH3 gene, DIAPH3 cDNA or a homolog thereof. The nucleic acid sequences encoding DIAPH3 can be isolated from vertebrate, mammalian, human, porcine, bovine, feline, avian, equine, canine, as well as additional primate sources. The DNA may be obtained by standard procedures known in the art from cloned DNA (e.g., a DNA “library”), by chemical synthesis, by cDNA cloning, or by the cloning of genomic DNA, or fragments thereof, purified from the desired cell, or by PCR amplification and cloning. (See, for example, Sambrook et al., MOLECULAR CLONING, A LABORATORY MANUAL, 2d. ed., Cold Spring Harbor Laboratory Press, Cold Spring Harbor, N.Y. (1989); Glover, D. M. (ed.), DNA CLONING: A PRACTICAL APPROACH, MRL Press, Ltd., Oxford, U.K. Vol. I, II (1985)). Clones derived from genomic DNA may contain regulatory and intron DNA regions in addition to coding regions; clones derived from cDNA will contain only exon sequences. Whatever the source, the gene should be cloned into a suitable vector for propagation of the gene.

[0050] In the cloning of the gene from genomic DNA, DNA fragments are generated, some of which will encode the desired gene. The DNA may be cleaved at specific sites using various restriction enzymes. Alternatively, one may use DNase in the presence of manganese to fragment the DNA, or the DNA can be physically sheared, as for example, by sonication. The linear DNA fragments can then be separated according to size by standard techniques, including but not limited to, agarose and polyacrylamide gel electrophoresis and column chromatography.

[0051] Once the DNA fragments are generated, identification of the specific DNA fragment containing the desired gene may be accomplished in a number of ways. For example, if a DIAPH3 gene (of any species) or its specific RNA, or a derivative thereof (see Section 5.6) is available and can be purified and labeled, the generated DNA fragments may be screened by nucleic acid hybridization to the labeled probe (Benton and Davis, Science 196:180 (1977); Grunstein and Hogness, Proc. Natl. Acad. Sci. U.S.A. 72:3961 (1975). Those DNA fragments with substantial homology to the probe will hybridize. It is also possible to identify the appropriate fragment by restriction enzyme digestion(s) and comparison of fragment sizes with those expected according to a known restriction map if such is available. Further selection can be carried out on the basis of the properties of the gene.

[0052] Alternatively, the presence of the gene may be detected by assays based on the physical, chemical, or immunological properties of its expressed product. For example, cDNA clones, or DNA clones that hybrid-select the proper mRNAs, can be selected that produce a protein having e.g., similar or identical electrophoretic migration, isoelectric focusing behavior, proteolytic digestion maps, effect on mitotic spindle pole formation, inhibition of cell proliferation activity, substrate binding activity, or antigenic properties as known for a specific DIAPH3. If an antibody to a particular DIAPH3 is available, that DIAPH3 may be identified by binding of labeled antibody to the clone(s) putatively producing the DIAPH3 in an ELISA (enzyme-linked immunosorbent assay)-type procedure.

[0053] A DIAPH3 or homolog thereof can also be identified by mRNA selection by nucleic acid hybridization followed by in vitro translation. In this procedure, fragments are used to isolate complementary mRNAs by hybridization. Such DNA fragments may represent available, purified DNA of another species containing a gene encoding DIAPH3. Immunoprecipitation analysis or functional assays (e.g., aggregation ability in vitro; binding to receptor; see infra) of the in vitro translation products of the isolated products of the isolated mRNAs identifies the mRNA and, therefore, the complementary DNA fragments that contain the desired sequences. In addition, specific mRNAs may be selected by adsorption of polysomes isolated from cells to immobilized antibodies specifically directed against a specific DIAPH3. A radiolabelled DIAPH3-encoding cDNA can be synthesized using the selected mRNA (from the adsorbed polysomes) as a template. The radiolabelled mRNA or cDNA may then be used as a probe to identify the DIAPH3-encoding DNA fragments from among other genomic DNA fragments.

[0054] Alternatives to isolating the DIAPH3 genomic DNA include, but are not limited to, chemically synthesizing the gene sequence itself from a known sequence or making cDNA to the mRNA which encodes DIAPH3. For example, RNA for the cloning of DIAPH3 cDNA can be isolated from cells that express a DIAPH3 gene. Other methods are possible and within the scope of the invention.

[0055] The identified and isolated DIAPH3- or DIAPH3 analog-encoding gene can then be inserted into an appropriate cloning vector. A large number of vector-host systems known in the art may be used. Possible vectors include, but are not limited to, plasmids or modified viruses, but the vector system must be compatible with the host cell used. Such vectors include, but are not limited to, bacteriophages such as lambda derivatives, or plasmids such as pBR322 or pUC plasmid derivatives or the pBluescript vector (Stratagene). The insertion into a cloning vector can, for example, be accomplished by ligating the DNA fragment into a cloning vector which has complementary cohesive termini. However, if the complementary restriction sites used to fragment the DNA are not present in the cloning vector, the ends of the DNA molecules may be enzymatically modified. Alternatively, any site desired may be produced by ligating nucleotide sequences (linkers) onto the DNA termini; these ligated linkers may comprise specific chemically synthesized oligonucleotides encoding restriction endonuclease recognition sequences. In an alternative method, the cleaved vector and DIAPH3-encoding gene or nucleic acid sequence may be modified by homopolymeric tailing. Recombinant molecules can be introduced into host cells via transformation, transfection, infection, electroporation, etc., so that many copies of the gene sequence are generated.

[0056] In an alternative method, the desired gene may be identified and isolated after insertion into a suitable cloning vector in a “shotgun” approach. Enrichment for the desired gene, for example, by size fractionization, can be done before insertion into the cloning vector.

[0057] In specific embodiments, transformation of host cells with recombinant DNA molecules that incorporate the isolated DIAPH3-encoding gene, cDNA, or synthesized DNA sequence enables generation of multiple copies of the gene. Thus, the gene may be obtained in large quantities by growing transformants, isolating the recombinant DNA molecules from the transformants and, when necessary, retrieving the inserted gene from the isolated recombinant DNA.

[0058] It will be understood that the RNA sequence equivalent of the nucleotide sequences provided herein can be easily and routinely generated by the substitution of thymine (T) residues with uracil (U) residues.

[0059] The DIAPH3-encoding or -related sequences provided by the instant invention include those nucleotide sequences encoding substantially the same amino acid sequences as found in native DIAPH3, and those encoded amino acid sequences with functionally equivalent amino acids, as well as those encoding other DIAPH3 derivatives, as described in Section 5.6 infra for derivatives of the DIAPH3 described herein.

[0060] The invention further relates to fragments and other derivatives of DIAPH3. Nucleic acids encoding such fragments or derivatives are thus also within the scope of the invention. The DIAPH3 gene, and DIAPH3-encoding nucleic acid sequences, of the invention include human and related genes (homologs) in other species. In specific embodiments, DIAPH3 and DIAPH3 are from vertebrates, or more particularly, mammals. In a preferred embodiment of the invention, DIAPH3 and DIAPH3 are of human origin. Production of the foregoing proteins and derivatives, e.g., by recombinant methods, is provided.

### 5.2 EXPRESSION OF GENES AND SEQUENCES ENCODING DIAPH3

[0061] The nucleotide sequence coding for DIAPH3 or a functionally active fragment or other derivative thereof (see Section 5.6), can be inserted into an appropriate expression vector, i.e., a vector which contains the necessary elements for the transcription and translation of the inserted protein-coding sequence. The necessary transcriptional and translational signals can also be supplied by the native DIAPH3 gene and/or its flanking regions. A variety of host-vector systems may be utilized to express the protein-coding sequence. These include but are not limited to mammalian cell systems infected with virus (e.g., vaccinia virus, adenovirus, etc.); insect cell systems infected with virus (e.g., baculovirus); microorganisms such as yeast containing yeast vectors, or bacteria transformed with bacteriophage, DNA, plasmid DNA, or cosmid DNA. The expression elements of vectors vary in their strengths and specificities. Depending on the host-vector system utilized, any one of a number of suitable transcription and translation elements may be used. In specific embodiments, the human DIAPH3 cDNA is expressed, or a sequence encoding a functionally active portion of human DIAPH3 encoded by the DIAPH3 gene is expressed. In yet another embodiment, a fragment of DIAPH3 comprising a domain of DIAPH3 is expressed.

[0062] Any of the methods previously described for the insertion of DNA fragments into a vector may be used to construct expression vectors containing a chimeric gene consisting of appropriate transcriptional/translational control signals and the protein coding sequences. These methods may include in vitro recombinant DNA and synthetic techniques and in vivo recombinants (genetic recombination). Expression of nucleic acid sequence encoding DIAPH3 or a peptide fragment thereof may be regulated by a second nucleic acid sequence so that DIAPH3 or a peptide fragment thereof is expressed in a host transformed with the recombinant DNA molecule. For example, expression of a DIAPH3 protein may be controlled by any promoter/enhancer element known in the art. In a specific embodiment, the promoter is heterologous to (i.e., not a native promoter of) the specific DIAPH3-encoding gene or nucleic acid sequence. Promoters that may be used to control expression of DIAPH3-encoding genes or nucleic acid sequences include, but are not limited to, the SV40 early promoter region (Bernoist and Chambon, Nature 290:304-310 (1981)), the promoter contained in the 3′ long terminal repeat of Rous sarcoma virus (Yamamoto et al., Cell 22:787-797 (1980)), the herpes thymidine kinase promoter (Wagner et al., Proc. Natl. Acad. Sci. U.S.A. 78:1441-1445 (1981)), the regulatory sequences of the metallothionein gene (Brinster et al., Nature 296:39-42 (1982)); prokaryotic expression vectors such as the β-lactamase promoter (Villa-Kamaroff et al., Proc. Natl. Acad. Sci. U.S.A. 75:3727-3731 (1978)), or the tat promoter (DeBoer et al., Proc. Natl. Acad. Sci. U.S.A. 80:21-25 (1983)); see also “Useful proteins from recombinant bacteria” in Scientific American, 242:74-94 (1980); plant expression vectors comprising the nopaline synthetase promoter region (Herrera-Estrella et al., Nature 303:209-213 (1983)) or the cauliflower mosaic virus 35S RNA promoter (Gardner et al., Nucleic Acids Res. 9:2871 (1981)), and the promoter of the photosynthetic enzyme ribulose biphosphate carboxylase (Herrera-Estrella et al., Nature 310:115-120 (1984)); promoter elements from yeast or other fungi such as the Gal4 promoter, the ADC (alcohol dehydrogenase) promoter, PGK (phosphoglycerol kinase) promoter, alkaline phosphatase promoter, and the following animal transcriptional control regions, which exhibit tissue specificity and have been utilized in transgenic animals: elastase I gene control region active in pancreatic acinar cells (Swift et al., Cell 38:639-646 (1984); Ornitz et al., Cold Spring Harbor Symp. Quant. Biol. 50:399-409 (1986); MacDonald, Hepatology 7:425-515 (1987)); insulin gene control region active in pancreatic beta cells (Hanahan, Nature 315:115-122 (1985)), immunoglobulin gene control region active in lymphoid cells (Grosschedl et al., Cell 38:647-658 (1984); Adames et al., Nature 318:533-538 (1985); Alexander et al., Mol. Cell. Biol. 7:1436-1444 (1987)), mouse mammary tumor virus control region active in testicular, breast, lymphoid and mast cells (Leder et al., Cell 45:485-495 (1986)), albumin gene control region active in liver (Pinkert et al., Genes and Devel. 1:268-276 (1987)), alpha-fetoprotein gene control region active in liver (Krumlauf et al., Mol. Cell. Biol. 5:1639-1648 (1985); Hammer et al., Science 235:53-58 (1987); alpha 1-antitrypsin gene control region active in the liver (Kelsey et al., Genes and Devel. 1 :161-171 (1987)), beta-globin gene control region active in myeloid cells (Mogram et al., Nature 315:338-340 (1985); Kollias et al., Cell 46:89-94 (1986); myelin basic protein gene control region active in oligodendrocyte cells in the brain (Readhead et al., Cell 48:703-712 (1987)); myosin light chain-2 gene control region active in skeletal muscle (Sani, Nature 314:283-286 (1985)), and gonadotropic releasing hormone gene control region active in the hypothalamus (Mason et al., Science 234:1372-1378 (1986)).

[0063] In a specific embodiment, a vector is used that comprises a promoter operably linked to a DIAPH3-encoding nucleic acid, one or more origins of replication, and, optionally, one or more selectable markers (e.g., an antibiotic resistance gene).

[0064] In a specific embodiment, an expression construct is made by subcloning the coding sequence from a DIAPH3-encoding gene or nucleic acid sequence into the EcoRI restriction site of each of the three pGEX vectors (Glutathione S-Transferase expression vectors; Smith and Johnson, Gene 7:31-40 (1988)). This allows for the expression of DIAPH3 from the subclone in the correct reading frame.

[0065] Expression vectors containing DIAPH3-encoding nucleic acid sequence inserts can be identified by three general approaches: (a) nucleic acid hybridization, (b) presence or absence of “marker” gene functions, and (c) expression of inserted sequences. In the first approach, the presence of a DIAPH3-encoding gene inserted in an expression vector can be detected by nucleic acid hybridization using probes comprising sequences that are homologous to an inserted DIAPH3-encoding gene. In the second approach, the recombinant vector/host system can be identified and selected based upon the presence or absence of certain “marker” gene functions (e.g., thymidine kinase activity, resistance to antibiotics, transformation phenotype, occlusion body formation in baculovirus, etc.) caused by the insertion of a DIAPH3-encoding gene or nucleic acid sequence into the vector. For example, if the DIAPH3-encoding gene is inserted within the marker gene sequence of the vector, recombinants containing the insert can be identified by the absence of the marker gene function. In the third approach, recombinant expression vectors can be identified by assaying the specific DIAPH3 product expressed by the recombinant. Such assays can be based, for example, on the physical or functional properties of the DIAPH3 in in vitro assay systems, e.g., interaction with Rho GTPases, recruitment of actin subunits, or visible effects on mitotic spindle pole formation.

[0066] Once a particular recombinant DNA molecule is identified and isolated, several methods known in the art may be used to propagate it. Once a suitable host system and growth conditions are established, recombinant expression vectors can be propagated and prepared in quantity. As previously explained, the expression vectors that can be used include, but are not limited to, the following vectors or their derivatives: human or animal viruses such as vaccinia virus or adenovirus; insect viruses such as baculovirus; yeast vectors; bacteriophage vectors (e.g., lambda), and plasmid and cosmid DNA vectors.

[0067] In addition, a host cell strain may be chosen which modulates the expression of the inserted sequences, or modifies and processes the gene product in the specific fashion desired. Expression from certain promoters can be elevated in the presence of certain inducers; thus, expression of the genetically engineered DIAPH3 may be controlled. Furthermore, different host cells have characteristic and specific mechanisms for the translational and post-translational processing and modification (e.g., glycosylation, phosphorylation of proteins. Appropriate cell lines or host systems can be chosen to ensure the desired modification and processing of the foreign protein expressed.

[0068] For example, expression in a bacterial system can be used to produce an unglycosylated core protein product. Expression in yeast will produce a glycosylated product. Expression in mammalian cells can be used to ensure “native” glycosylation of a heterologous protein. Furthermore, different vector/host expression systems may affect processing reactions to different degrees.

[0069] In other specific embodiments, DIAPH3, or fragment or derivative thereof, may be expressed as a fusion, or chimeric protein product, comprising the protein, fragment or derivative joined via a peptide bond to a protein sequence derived from a different protein. Such a chimeric product can be made by ligating the appropriate nucleic acid sequences encoding the desired amino acid sequences to each other by methods known in the art, in the proper coding frame, and expressing the chimeric product by methods commonly known in the art. In one embodiment, therefore, the invention includes an isolated nucleic acid comprising a sequence of at least 10 nucleotides encoding a chimeric DIAPH3, wherein the chimeric DIAPH3 displays at least one of the functional activities of the wild-type DIAPH3, and at least one non-DIAPH3 functional activity. Alternatively, such a chimeric product may be made by protein synthetic techniques, e.g., by use of a peptide synthesizer.

[0070] A person of skill in the art will appreciate that cDNA, genomic, and synthesized sequences can be cloned and expressed. One way to accomplish such expression is by transferring a DIAPH3 -encoding gene, DIAPH3 cDNA, or another nucleic acid encoding DIAPH3 or fragment thereof, to cells in tissue culture. The expression of the transferred nucleic acid may be controlled by its native promoter, or can be controlled by a non-native promoter. In addition to transferring a nucleic acid comprising a nucleic acid sequence encoding the entire DIAPH3 (i.e., equivalent to the wild type), the transferred nucleic acids can be any of the nucleic acids taught herein, e.g., nucleic acids that encode a functional portion of DIAPH3, or a protein having at least 60% sequence identity to the DIAPH3 disclosed herein, as compared over the length of DIAPH3, or a polypeptide having at least 60% sequence similarity to a DIAPH3 fragment, as compared over the length of the DIAPH3 fragment. Introduction of the nucleic acid into the cell is accomplished by such methods as electroporation, lipofection, calcium phosphate mediated transfection, or viral infection. Usually, the method of transfer includes the transfer of a selectable marker to the cells. The cells are then placed under selection to isolate those cells that have taken up and are expressing the transferred gene. The expressed DIAPH3 or fragments thereof are isolated and purified as described below.

### 5.3 Identification and Purification of DIAPH3 and Fragments Thereof

[0071] In particular aspects, the invention provides amino acid sequence of DIAPH3, preferably human DIAPH3, and fragments and derivatives thereof that comprise an antigenic determinant (i.e., a portion of a polypeptide that can be recognized by an antibody) or which are otherwise functionally active, as well as nucleic acid sequences encoding the foregoing. “Functionally active” DIAPH3 material as used herein refers to that material displaying one or more known functional activities associated with a full-length (wild-type) DIAPH3, e.g., activities associated with FH proteins; antigenicity (the ability to be bound by an antibody against DIAPH3, specifically, the ability to be bound by an antibody to a protein consisting of the amino acid sequence of SEQ ID NO: 3); immunogenicity (the ability to induce the production of an antibody that binds SEQ ID NO: 3), and so forth.

[0072] In one embodiment, the protein of the invention comprises less than the entire amino acid sequence of SEQ ID NO: 3. In other specific embodiments, the invention provides fragments of DIAPH3 consisting of at least 6, 10, 30, 50, 75, 100, 150, 200, 250, 300, 400, 450, 500, 600, 700, 800, 900, 1000, or 1100 amino acids that have less than the full-length DIAPH3 protein sequence. In another embodiment, said fragments of DIAPH3 consist of at least the C-terminal 6, 10, 30, 50, 75, 100, 150, 200, 250, 300, 400, 450, 500, 600, 700, 800, 900, 1000, or 1100 amino acids of SEQ ID NO: 3. In other embodiments, the proteins comprise or consist essentially of an FH2 domain of DIAPH3. For example, in one embodiment, the protein comprises amino acids 636-1152 of SEQ ID NO: 3; in another embodiment, the protein comprises amino acids 636-1110 of SEQ ID NO: 3. Fragments, or proteins comprising fragments, lacking the FH2 domain are also provided. Nucleic acids encoding the foregoing are also provided.

[0073] Once a recombinant that expresses the DIAPH3-encoding gene sequence, or part thereof, is identified, the resulting product can be analyzed. This analysis is achieved by assays based on the physical or functional properties of the product, including radioactive labeling of the product followed by analysis by gel electrophoresis, immunoassay, effects of the expressed product on motitic spindle pole formation in cells expressing the product, etc.

[0074] Once the DIAPH3, or analog, homolog or fragment thereof, is identified, it may be isolated and purified by standard methods including chromatography (e.g., ion exchange, affinity, and sizing column chromatography), centrifugation, differential solubility, or by any other standard technique for the purification of proteins. A DIAPH3 protein is “purified” when it is separated from at least half of the proteins associated with the cell that produces the DIAPH3 as measured by molecular weight or concentration in solution. In more specific embodiments, the DIAPH3 is purified to at least 80%, 90%, 95% or 99% purity; that is, the DIAPH3 protein comprises at least 80%, 90%, 95% or 99% by weight of the protein present. A solution comprising only DIAPH3 and a substantial amount of a carrier protein (such as albumin), for example, 10-20% carrier protein, with negligible amounts of other proteins, is considered purified. The functional properties of the purified DIAPH3 may be evaluated using any suitable assay (see Section 5.7).

[0075] Alternatively, once DIAPH3 produced by a recombinant is identified, the amino acid sequence of the protein can be deduced from the nucleotide sequence of the chimeric gene contained in the recombinant. As a result, the protein can be synthesized by standard chemical methods known in the art (e.g., see Hunkapiller et al., Nature 310:105-111 (1984)).

[0076] In another alternate embodiment, the native DIAPH3 protein can be purified from natural sources, by standard methods such as those described above (e.g., immunoaffinity purification).

[0077] In a specific embodiment of the present invention, DIAPH3, whether produced by recombinant DNA techniques or by chemical synthetic methods or by purification of native proteins, include but are not limited to those containing, as a primary amino acid sequence, all or part of the amino acid sequence substantially as depicted in FIGS. 1A-1E (SEQ ID NO: 3), as well as fragments and other derivatives thereof, including proteins homologous thereto.

### 5.4 Structure of DIAPH3 Genes and Homologs, and DIAPH3

[0078] The structure of the genes encoding DIAPH3, and the encoded DIAPH3, can be analyzed by various methods known in the art, as described in the following sections.

### 5.4.1 Genetic Analysis

[0079] The cloned DNA or cDNA corresponding to a DIAPH3-encoding gene can be analyzed by methods including, but not limited to, Southern hybridization (Southern, E. M., J. Mol. Biol. 98:503-517 (1975)), northern hybridization (see e.g., Freeman et al., Proc. Natl. Acad. Sci. U.S.A. 80:4094-4098 (1983)), restriction endonuclease mapping (Maniatis, T., MOLECULAR CLONING, A LABORATORY MANUAL, Cold Spring Harbor, N.Y. (1982)), and DNA sequence analysis. Polymerase chain reaction (PCR; U.S. Pat. Nos. 4,683,202, 4,683,195 and 4,889,818; Gyllenstein et al., Proc. Natl. Acad. Sci. U.S.A. 85:7652-7656 (1988); Ochman et al., Genetics 120:621-623 (1988); Loh et al., Science 243:217-220 (1989)) followed by Southern hybridization with a probe specific to a DIAPH3-encoding gene can allow the detection of that particular DIAPH3-encoding gene in DNA from various cell types from various vertebrate sources. Methods of amplification other than PCR are commonly known and can also be employed. In one embodiment, Southern hybridization can be used to determine the genetic linkage of a DIAPH3 gene. Northern hybridization analysis can be used to determine the expression of a DIAPH3 gene. Various cell types, at various states of development or activity can be tested for expression of a DIAPH3 gene. In one preferred embodiment, screening arrays comprising probes homologous to the exons of DIAPH3-encoding genes are used to determine the state of expression of these genes, or specific exons of these genes, in various cell types, under particular environmental or perturbance conditions, or in various vertebrates. The stringency of the hybridization conditions for both Southern and northern hybridization can be manipulated to ensure detection of nucleic acids with the desired degree of relatedness to the specific probe used. Modifications of these methods and other methods commonly known in the art can be used.

[0080] Restriction endonuclease mapping can be used to roughly determine the genetic structure of DIAPH3 or any other DIAPH3-encoding gene. Restriction maps derived by restriction endonuclease cleavage can be confirmed by DNA sequence analysis. The genetic structure of a DIAPH3-encoding gene can also be determined using scanning oligonucleotide arrays, wherein the expression of one exon is correlated with the expression of a plurality of neighboring exons, such that the correlation indicates the correlated exons are contained within the same gene. The structure so determined can be confirmed by PCR.

[0081] DNA sequence analysis can be performed by any techniques known in the art, including but not limited to the method of Maxam and Gilbert, Meth. Enzymol. 65:499-5601 (1980), the Sanger dideoxy method (Sanger, F., et al., Proc. Natl. Acad. Sci. U.S.A. 74:5463 (1977)), the use of T7 DNA polymerase (Tabor and Richardson, U.S. Pat. No. 4,795,699), or use of an automated DNA Sequenator (e.g., Applied Biosystems, Foster City, Calif.). The sequencing method may use radioactive or fluorescent labels.

### 5.4.2 Protein Analysis

[0082] The amino acid sequence of DIAPH3 or a homolog thereof can be derived by deduction from the DNA sequence, or alternatively, by direct sequencing of the protein, e.g., with an automated amino acid sequencer.

[0083] The protein sequence of DIAPH3 can be characterized by a hydrophilicity analysis (Hopp and Woods, Proc. Natl. Acad. Sci. U.S.A. 78:3824 (1981)). A hydrophilicity profile is used to identify the hydrophobic and hydrophilic regions of DIAPH3 or a homolog thereof and the corresponding regions of the gene sequence which encode such regions.

[0084] Secondary structural analysis (Chou and Fasman, Biochemistry 13:222 (1974)) can also be done, to identify regions of DIAPH3 or homologs thereof that assume specific secondary structures, such as α-helices, β-pleated sheets or turns.

[0085] Manipulation, translation, secondary structure prediction, open reading frame prediction and plotting, as well as determination of sequence homologies, can also be accomplished using computer software programs and nucleotide and protein sequence databases available in the art. Protein and/or nucleotide sequence homologies to known proteins or DNA sequences can be used to deduce the likely function of a DIAPH3, or domains thereof.

[0086] Other methods of structural analysis can also be employed. These include but are not limited to X-ray crystallography (Engstom, Biochem. Exp. Biol. 11:7-13 (1974)) and computer modeling (Fletterick, and Zoller, (eds.), “Computer Graphics and Molecular Modeling,” in CURRENT COMMUNICATIONS IN MOLECULAR BIOLOGY, Cold Spring Harbor Laboratory, Cold Spring Harbor, N.Y. (1986)).

### 5.5 Generation of Antibodies to DIAPH3 and Derivatives thereof

[0087] According to the invention, DIAPH3, its fragments, or other derivatives thereof may be used as an immunogen to generate antibodies which immunospecifically bind such an immunogen. Such antibodies include but are not limited to polyclonal, monoclonal, chimeric and single chain antibodies, as well as Fab fragments and an Fab expression library. In a specific embodiment, antibodies to human DIAPH3 are produced. In another specific embodiment, antibodies are produced that specifically bind to a protein the amino acid sequence of which consists of SEQ ID NO: 3. In another embodiment, antibodies to a domain of human DIAPH3 are produced. In a more specific embodiment, said antibody specifically binds the FH2 domain of a protein the amino acid sequence of which consists of SEQ ID NO: 3. In another specific embodiment, said antibody specifically binds to an epitope present within amino acids 1110-1152 of SEQ ID NO: 3. In another embodiment, antibodies to non-human DIAPH3 or a fragment thereof are produced. In a specific embodiment, fragments of DIAPH3, human or non-human, identified as containing hydrophilic regions are used as immunogens for antibody production. In a specific embodiment, a hydrophilicity analysis can be used to identify hydrophilic regions of DIAPH3, which are potential epitopes, and thus can be used as immunogens.

[0088] Various procedures known in the art may be used for the production of polyclonal antibodies to DIAPH3, or derivative thereof. In a particular embodiment, rabbit polyclonal antibodies to an epitope of DIAPH3 encoded by a sequence of SEQ ID NO: 1 or SEQ ID NO: 2 or a subsequence thereof, can be obtained. For the production of antibody, various host animals can be immunized by injection with native DIAPH3, or a synthetic version or derivative (e.g., fragment) thereof, including, but not limited to, rabbits, mice, rats, goats, bovines or horses. Various adjuvants may be used to increase the immunological response, depending on the host species. Adjuvants that may be used according to the present invention include, but are not limited to, Freund's (complete and incomplete), mineral gels such as aluminum hydroxide, surface active substances such as lysolecithin, pluronic polyols, polyanions, peptides, oil emulsions, keyhole limpet hemocyanins, dinitrophenol, and potentially useful human adjuvants such as BCG (bacille Calmette-Guerin) and Corynebacterium parvum.

[0089] For preparation of monoclonal antibodies directed toward a DIAPH3 sequence or derivative thereof, any technique that provides for the production of antibody molecules by continuous cell lines in culture may be used. For example, monoclonal antibodies may be prepared by the hybridoma technique originally developed by Kohler and Milstein, Nature 256:495-497 (1975), as well as the trioma technique, the human B-cell hybridoma technique (Kozbor et al., Immunol. Today 4:72 (1983)), or the EBV-hybridoma technique (Cole et al., in MONOCLONAL ANTIBODIES AND CANCER THERAPY, Alan R. Liss, Inc., pp. 77-96 (1985)). In an additional embodiment of the invention, monoclonal antibodies can be produced in germ-free animals utilizing recent technology (International Publication No. W08912690, published Dec. 28, 1989). According to the invention, human antibodies may be used and can be obtained by using human hybridomas (Cote et al., Proc. Natl. Acad. Sci. U.S.A., 80:2026-2030 (1983)) or by transforming human B cells with EBV virus in vitro (Cole et al., in MONOCLONAL ANTIBODIES AND CANCER THERAPY, Alan R. Liss, pp. 77-96 (1985)). Furthermore, according to the invention, techniques developed for the production of “chimeric antibodies” (Morrison et al., Proc. Natl. Acad. Sci. U.S.A. 81:6851-6855 (1984); Neuberger et al., Nature 312:604-608 (1984); Takeda et al., Nature 314:452-454 (1985)) can be used, wherein genes from a mouse antibody molecule specific to DIAPH3 are spliced to genes encoding a human antibody molecule of appropriate biological activity can be used; such antibodies are within the scope of this invention.

[0090] In addition, techniques have been developed for the production of humanized antibodies, and such humanized antibodies to DIAPH3 are within the scope of the present invention. (See, e.g., Queen, U.S. Pat. No. 5,585,089 and Winter, U.S. Pat. No. 5,225,539.) An immunoglobulin light or heavy chain variable region consists of a “framework” region interrupted by three hypervariable regions, referred to as complementarity determining regions (CDRs). The extent of the framework region and CDRs have been precisely defined (see, “Sequences of Proteins of Immunological Interest”, Kabat, E. et al., U.S. Department of Health and Human Services (1983)). Briefly, humanized antibodies are antibody molecules from non-human species having one or more CDRs from the non-human species and a framework region from a human immunoglobulin molecule.

[0091] According to the invention, techniques described for the production of single chain antibodies (U.S. Pat. No. 4,946,778) can be adapted to produce single chain antibodies specific to DIAPH3. An additional embodiment of the invention utilizes the techniques described for the construction of Fab expression libraries (Huse et al., DIAPH3 246:1275-1281 (1988)) to allow rapid and easy identification of monoclonal Fab fragments with the desired specificity for DIAPH3 or derivatives thereof. Antibody fragments that contain the idiotype of the molecule can be generated by known techniques. For example, such fragments include but are not limited to: the F(ab′), fragment which can be produced by pepsin digestion of the antibody molecule; the Fab′ fragments which can be generated by reducing the disulfide bridges of the F(ab′), fragment, the Fab fragments which can be generated by treating the antibody molecule with papain and a reducing agent, and Fv fragments.

[0092] In the production of antibodies, screening for the desired antibody can be accomplished by techniques known in the art, e.g. ELISA (enzyme-linked immunosorbent assay), RIA (radioimmunoassay) or RIBA (recombinant immunoblot assay). For example, to select antibodies which recognize a specific domain of DIAPH3, one may assay generated hybridomas for a product which binds to a DIAPH3 fragment containing such domain. For selection of an antibody that specifically binds a first DIAPH3 homolog but which does not specifically bind a second, different DIAPH3 homolog, one can select on the basis of positive binding to the first DIAPH3 homolog and a lack of binding to the second DIAPH3 homolog.

[0093] Antibodies specific to a domain of DIAPH3 or a homolog thereof are also provided. The foregoing antibodies can be used in methods known in the art relating to the localization and activity of the DIAPH3 of the invention, e.g., for imaging these proteins, measuring levels thereof in appropriate physiological samples, in diagnostic methods, etc.

[0094] In another embodiment of the invention, antibodies to DIAPH3 or homologs thereof, and antibody fragments thereof containing the binding domain are therapeutics (see infra). In a preferred embodiment, the antibodies are isolated or purified.

### 5.6 DIAPH3 AND DIAPH3 Derivatives

[0095] The invention further relates to DIAPH3 and derivatives thereof (including but not limited to fragments of DIAPH3). Nucleic acids encoding derivatives and fragments of DIAPH3 are also provided. In one embodiment, DIAPH3 is encoded by the DIAPH3-encoding nucleic acids described in Section 5.1 supra.

[0096] The production and use of derivatives produced through modification of DIAPH3-encoding genes, such as the DIAPH3 gene, DIAPH3 cDNA or the coding region of either thereof, are within the scope of the present invention. In a specific embodiment, the derivative is functionally active, i.e., capable of exhibiting one or more functional activities associated with a full-length, wild-type DIAPH3. As one example, such derivatives that have the desired immunogenicity or antigenicity can be used, for example, in immunoassays, for immunization, for inhibition of the activity of DIAPH3, etc. As another example, such derivatives that substantially have the desired DIAPH3 activity are provided. Derivatives that retain, or alternatively lack or inhibit, a desired DIAPH3 property of interest, a specific activity, such as activity associated with FH2 domains, can be used as inducers, or inhibitors, respectively, of such a property and its physiological correlates. A specific embodiment relates to a DIAPH3 fragment that can be bound by an antibody directed to the corresponding native DIAPH3. Derivatives of DIAPH3 can be tested for the desired activity(ies) by procedures known in the art, including but not limited to the assays described in Section 5.7.

[0097] In particular, derivatives of DIAPH3 can be made by altering the nucleotide sequences encoding them by substitutions, additions or deletions that provide for functionally equivalent protein molecules. In a specific embodiment, the alteration is made in a nucleic acid sequence encoding all or part of DIAPH3. Due to the degeneracy of nucleotide coding sequences, other DNA sequences that encode substantially the same amino acid sequence as a DIAPH3-encoding gene may be used in the practice of the present invention. These include but are not limited to nucleotide sequences comprising all or portions of DIAPH3-encoding genes that are altered by the substitution of different codons that encode the same amino acid residue within the sequence, thus producing a silent change.

[0098] Likewise, the DIAPH3 derivatives of the invention include, but are not limited to, those containing, as a primary amino acid sequence, all or part of the amino acid sequence of a DIAPH3 protein, including altered sequences in which functionally equivalent amino acid residues are substituted for residues within the sequence resulting in a silent or insubstantial change. For example, one or more amino acid residues within the sequence can be substituted by another amino acid of a similar polarity which acts as a functional equivalent, resulting in a silent alteration. Substitutes for an amino acid within the sequence may be selected from other members of the class to which the amino acid belongs. For example, the nonpolar (hydrophobic) amino acids include alanine, leucine, isoleucine, valine, proline, phenylalanine, tryptophan and methionine. The polar neutral amino acids include glycine, serine, threonine, cysteine, tyrosine, asparagine, and glutamine. The positively charged (basic) amino acids include arginine, lysine and histidine. The negatively charged (acidic) amino acids include aspartic acid and glutamic acid.

[0099] In specific embodiments, the invention provides DIAPH3 derivatives comprising 1, 2, 3, or up to 5, 10 or 20 amino acid substitutions as compared to SEQ ID NO: 3.

[0100] In a specific embodiment of the invention, proteins consisting of or comprising a fragment of DIAPH3 consisting of at least 30 (continuous) amino acids of DIAPH3 are provided. In other embodiments, the fragment consists of at least 40 or 50 amino acids of DIAPH3. In specific embodiments, such fragments are not larger than 35, 100 or 200 amino acids. Derivatives of DIAPH3 include but are not limited to those molecules comprising regions that are homologous to DIAPH3 or fragments thereof. In various embodiments, two amino acid sequences that are homologous share preferably at least 60% or 70%, more preferably at least 80% or 90%, and even more preferably at least 95% sequence identity over an amino acid sequence of identical size. When the alignment is done by a computer homology program known in the art, such as BLAST (blastp), the percent homology is calculated by dividing the number of amino acids in the DIAPH3 sequence or fragment thereof into the number of amino acids of the DIAPH3 sequence exactly matching the amino acid at the same position in the second sequence, where introduced gaps count as a mismatch, and where conservative changes count as a match. A BLAST comparison can also determine the “sequence similarity” between two proteins, where sequence similarity is defined as a positive score in, for example, a BLOSUM62 scoring matrix comparison of the two sequences.

[0101] Derivatives of DIAPH3 also include molecules whose encoding nucleic acid is capable of hybridizing to a DIAPH3-encoding sequence, under stringent, moderately stringent, or nonstringent conditions.

[0102] The DIAPH3 derivatives of the invention can be produced by various methods known in the art. The manipulations which result in their production can occur at the gene or protein level. For example, the cloned gene sequence of DIAPH3 or a homolog thereof can be modified by any of numerous strategies known in the art (Maniatis, MOLECULAR CLONING, A LABORATORY MANUAL, 2d. ed., Cold Spring Harbor Laboratory, Cold Spring Harbor, N.Y. (1990)). The sequence can be cleaved at appropriate sites with restriction endonuclease(s), followed by further enzymatic modification if desired, then isolated and ligated in vitro. In the production of a gene encoding a derivative of DIAPH3, care should be taken to ensure that the modified gene remains within the same translational reading frame as DIAPH3, uninterrupted by translational stop signals, in the gene region where the desired DIAPH3 activity is encoded.

[0103] Additionally, a DIAPH3-encoding nucleic acid sequence can be mutated in vitro or in vivo to create and/or destroy translation, initiation, and/or termination sequences, or to create variations in coding regions and/or form new restriction endonuclease sites or destroy preexisting ones, to facilitate further in vitro modification. Any technique for mutagenesis known in the art can be used, including but not limited to, chemical mutagenesis, in vitro site-directed mutagenesis (Hutchinson, et al., J. Biol. Chem. 253:6551(1978)), use of TAB linkers (Pharmacia), PCR using mutagenizing primers, and so forth.

[0104] Manipulations of a DIAPH3 sequence may also be made at the protein level. Included within the scope of the invention are DIAPH3 fragments or other derivatives that are differentially modified during or after translation, e.g., by glycosylation, acetylation, phosphorylation, amidation, derivatization by known protecting/blocking groups, proteolytic cleavage, or linkage to an antibody molecule or other cellular ligand. Any of numerous chemical modifications may be carried out by known techniques, including, but not limited to, specific chemical cleavage by cyanogen bromide, trypsin, chymotrypsin, papain, V8 protease, NaBH₄; acetylation, formylation, oxidation, reduction; metabolic synthesis in the presence of tunicamycin; and so forth.

[0105] In addition, derivatives of DIAPH3 can be chemically synthesized. For example, a peptide corresponding to a portion of DIAPH3 that comprises a desired domain, or which mediates the desired activity in vitro, can be synthesized by use of a peptide synthesizer. Furthermore, if desired, nonclassical amino acids or chemical amino acid analogs can be introduced as a substitution or addition into the particular DIAPH3 sequence. Non-classical amino acids include, but are not limited, to the D-isomers of the common amino acids, “-amino isobutyric acid, 4-aminobutyric acid, Abu, 2-amino butyric acid, g-Abu, e-Ahx, 6-amino hexanoic acid, Aib, 2-amino isobutyric acid, 3-amino propionic acid, ornithine, norleucine, norvaline, hydroxyproline, sarcosine, citrulline, cysteic acid, t-butylglycine, t-butylalanine, phenylglycine, cyclohexylalanine, b-alanine, fluoro-amino acids, designer amino acids such as b-methyl amino acids, Ca-methyl amino acids, Na-methyl amino acids, and amino acid analogs in general. Furthermore, the amino acid can be D (dextrorotary) or L (levorotary).

[0106] In a specific embodiment, the derivative of a DIAPH3 is a chimeric, or fusion, protein comprising a DIAPH3 protein or fragment thereof, preferably consisting of at least a domain or motif of DIAPH3, or at least 6 amino acids of DIAPH3, joined at its amino- or carboxy-terminus via a peptide bond to an amino acid sequence of a different protein. In one embodiment, such a chimeric protein is produced by recombinant expression of a nucleic acid encoding the protein, comprising a DIAPH3-coding sequence joined in-frame to a coding sequence for a different protein. Such a chimeric product can be made by ligating the appropriate nucleic acid sequences encoding the desired amino acid sequences to each other by methods known in the art, in the proper coding frame, and expressing the chimeric product by methods commonly known in the art. Alternatively, such a chimeric product may be made by protein synthetic techniques, e.g. by use of a peptide synthesizer. Chimeric genes comprising portions of a DIAPH3-encoding gene, fused to any heterologous protein-encoding sequences, may be constructed. A specific embodiment relates to a chimeric protein comprising a fragment of DIAPH3 of at least six amino acids.

[0107] Other specific embodiments of derivatives are described in the subsection below and examples sections infra.

[0108] In a specific embodiment, the invention relates to DIAPH3 derivatives; and fragments and derivatives of such fragments, that comprise, or alternatively consist of, one or more domains of DIAPH3, including but not limited to a functional (e.g., binding) fragment of DIAPH3.

[0109] In another specific embodiment, a molecule is provided that comprises one or more domains (or functional portion thereof) of DIAPH3 but that also lacks one or more domains (or functional portion thereof) of DIAPH3. In a particular examples, a DIAPH3 derivative is provided that lacks the FH2 domain. In another embodiment, a molecule is provided that comprises one or more domains (or functional portion thereof) of a DIAPH3 and that has one or more mutant (e.g., due to deletion or point mutation(s)) domains of DIAPH3 such that the mutant domain has increased or decreased function. In a specific embodiment, one, two, or three point mutations are present. A person of skill in the art would understand that fragments comprising one or more domains, or one or more mutant domains, may be derived from naturally-occurring variants of DIAPH3, or from DIAPH3 analogs of other species, as well.

### 5.7 Assays of DIAPH3 and DIAPH3 Derivatives

[0110] The functional activity of DIAPH3, and derivatives thereof, including, but not limited to, binding to profilin or to a Rho GTPase, and/or the mediation of Rho-directed actin fiber assembly, can be assayed by various methods. For example, in one embodiment, where one is assaying for the ability to bind or compete with the wild-type DIAPH3 for binding to an antibody raised against the protein, various immunoassays known in the art can be used, including but not limited to competitive and non-competitive assay systems using techniques such as radioimmunoassays, ELISA (enzyme linked immunosorbent assay), “sandwich” immunoassays, immunoradiometric assays, gel diffusion precipitin reactions, immunodiffusion assays, in situ immunoassays (using colloidal gold, enzyme or radioisotope labels, for example), western blots, precipitation reactions, agglutination assays (e.g., gel agglutination assays, hemagglutination assays), complement fixation assays, immunofluorescence assays, protein A assays, and immunoelectrophoresis assays, etc. In one embodiment, antibody binding is detected by detecting a label on the primary antibody. In another embodiment, the primary antibody is detected by detecting binding of a secondary antibody or reagent to the primary antibody. In a further embodiment, the secondary antibody is labeled. Many means are known in the art for detecting binding in an immunoassay and are within the scope of the present invention.

[0111] In another embodiment, in those situations where a DIAPH3-binding protein, such as a Rho-GTPase, is identified, the binding can be assayed, e.g., by means well-known in the art. In another embodiment, physiological correlates of the binding of DIAPH3 to its substrate(s) can be assayed.

### 5.8 DIAPH3 as a Diagnostic and Prognostic Marker in Breast Cancer

[0112] The human DIAPH3 gene was identified pursuant to a study in which over 25,000 separate and unique genetic markers were examined to identify those the expression of which in breast cancer tumor cells, when compared to the expression of the same markers in normal cells, could be used to differentiate patients having a good prognosis from those having a poor prognosis, where poor prognosis is defined as the occurrence of a distant breast cancer metastasis within five years of initial diagnosis. The expression of these markers in a cohort of 78 patients was analyzed, and a subset of 231 markers was collected which differentiated good prognosis from poor prognosis patients. Of these 231 markers, a preferred set of 70 markers, those whose expression was most strongly correlated or anti-correlated with the tumor condition, was established. The details of these experiments are disclosed in International Publication No. WO 02/103320, published Dec. 27, 2002, which is incorporated herein by reference in its entirety. The 231 markers are listed in Table 1. Table 2, below, lists the 70 preferred markers from Table 1. Each entry in Table 2 includes a GenBank Accession number or Contig number, the correlation or anticorrelation to the tumor condition, the sequence name where applicable, and a description of the sequence. Contig sequences were obtained from Phil Green EST contigs, which is a collection of EST contigs assembled by Dr. Phil Green et al at the University of Washington (Ewing and Green, Nat. Genet. 25(2):232-4 (2000)), available on the Internet at phrap.org/est_assembly/index.html.

TABLE 1
231 gene markers that distinguish patients with good
prognosis from patients with poor prognosis.

| GenBank | |
|---|---|
| Accession Number/ | |
| Contig Number | SEQ ID NO |
| AA555029_RC | SEQ ID NO 46 |
| AB020689 | SEQ ID NO 47 |
| AB032973 | SEQ ID NO 48 |
| AB033007 | SEQ ID NO 49 |
| AB033043 | SEQ ID NO 50 |
| AB037745 | SEQ ID NO 51 |
| AB037863 | SEQ ID NO 52 |
| AF052159 | SEQ ID NO 53 |
| AF052162 | SEQ ID NO 54 |
| AF055033 | SEQ ID NO 55 |
| AF073519 | SEQ ID NO 56 |
| AF148505 | SEQ ID NO 57 |
| AF155117 | SEQ ID NO 58 |
| AF161553 | SEQ ID NO 59 |
| AF201951 | SEQ ID NO 60 |
| AF257175 | SEQ ID NO 61 |
| AJ224741 | SEQ ID NO 62 |
| AK000745 | SEQ ID NO 63 |
| AL050021 | SEQ ID NO 64 |
| AL050090 | SEQ ID NO 65 |
| AL080059 | SEQ ID NO 66 |
| AL080079 | SEQ ID NO 67 |
| AL080110 | SEQ ID NO 68 |
| AL133603 | SEQ ID NO 69 |
| AL133619 | SEQ ID NO 70 |
| AL137295 | SEQ ID NO 71 |
| AL137502 | SEQ ID NO 72 |
| AL137514 | SEQ ID NO 73 |
| AL137718 | SEQ ID NO 4 |
| AL355708 | SEQ ID NO 74 |
| D25328 | SEQ ID NO 75 |
| L27560 | SEQ ID NO 76 |
| M21551 | SEQ ID NO 77 |
| NM_000017 | SEQ ID NO 78 |
| NM_000096 | SEQ ID NO 79 |
| NM_000127 | SEQ ID NO 80 |
| NM_000158 | SEQ ID NO 81 |
| NM_000224 | SEQ ID NO 82 |
| NM_000286 | SEQ ID NO 83 |
| NM_000291 | SEQ ID NO 84 |
| NM_000320 | SEQ ID NO 85 |
| NM_000436 | SEQ ID NO 86 |
| NM_000507 | SEQ ID NO 87 |
| NM_000599 | SEQ ID NO 88 |
| NM_000788 | SEQ ID NO 89 |
| NM_000849 | SEQ ID NO 90 |
| NM_001007 | SEQ ID NO 91 |
| NM_001124 | SEQ ID NO 92 |
| NM_001168 | SEQ ID NO 93 |
| NM_001216 | SEQ ID NO 94 |
| NM_001280 | SEQ ID NO 95 |
| NM_001282 | SEQ ID NO 96 |
| NM_001333 | SEQ ID NO 97 |
| NM_001673 | SEQ ID NO 98 |
| NM_001809 | SEQ ID NO 99 |
| NM_001827 | SEQ ID NO 100 |
| NM_001905 | SEQ ID NO 101 |
| NM_002019 | SEQ ID NO 102 |
| NM_002073 | SEQ ID NO 103 |
| NM_002358 | SEQ ID NO 104 |
| NM_002570 | SEQ ID NO 105 |
| NM_002808 | SEQ ID NO 106 |
| NM_002811 | SEQ ID NO 107 |
| NM_002900 | SEQ ID NO 108 |
| NM_002916 | SEQ ID NO 109 |
| NM_003158 | SEQ ID NO 110 |
| NM_003234 | SEQ ID NO 111 |
| NM_003239 | SEQ ID NO 112 |
| NM_003258 | SEQ ID NO 113 |
| NM_003376 | SEQ ID NO 114 |
| NM_003600 | SEQ ID NO 115 |
| NM_003607 | SEQ ID NO 116 |
| NM_003662 | SEQ ID NO 117 |
| NM_003676 | SEQ ID NO 118 |
| NM_003748 | SEQ ID NO 119 |
| NM_003862 | SEQ ID NO 120 |
| NM_003875 | SEQ ID NO 121 |
| NM_003878 | SEQ ID NO 122 |
| NM_003882 | SEQ ID NO 123 |
| NM_003981 | SEQ ID NO 124 |
| NM_004052 | SEQ ID NO 125 |
| NM_004163 | SEQ ID NO 126 |
| NM_004336 | SEQ ID NO 127 |
| NM_004358 | SEQ ID NO 128 |
| NM_004456 | SEQ ID NO 129 |
| NM_004480 | SEQ ID NO 130 |
| NM_004504 | SEQ ID NO 131 |
| NM_004603 | SEQ ID NO 132 |
| NM_004701 | SEQ ID NO 133 |
| NM_004702 | SEQ ID NO 134 |
| NM_004798 | SEQ ID NO 135 |
| NM_004911 | SEQ ID NO 136 |
| NM_004994 | SEQ ID NO 137 |
| NM_005196 | SEQ ID NO 138 |
| NM_005342 | SEQ ID NO 139 |
| NM_005496 | SEQ ID NO 140 |
| NM_005563 | SEQ ID NO 141 |
| NM_005915 | SEQ ID NO 142 |
| NM_006096 | SEQ ID NO 143 |
| NM_006101 | SEQ ID NO 144 |
| NM_006115 | SEQ ID NO 145 |
| NM_006117 | SEQ ID NO 146 |
| NM_006201 | SEQ ID NO 147 |
| NM_006265 | SEQ ID NO 148 |
| NM_006281 | SEQ ID NO 149 |
| NM_006372 | SEQ ID NO 150 |
| NM_006681 | SEQ ID NO 151 |
| NM_006763 | SEQ ID NO 152 |
| NM_006931 | SEQ ID NO 153 |
| NM_007036 | SEQ ID NO 154 |
| NM_007203 | SEQ ID NO 155 |
| NM_012177 | SEQ ID NO 156 |
| NM_012214 | SEQ ID NO 157 |
| NM_012261 | SEQ ID NO 158 |
| NM_012429 | SEQ ID NO 159 |
| NM_013262 | SEQ ID NO 160 |
| NM_013296 | SEQ ID NO 161 |
| NM_013437 | SEQ ID NO 162 |
| NM_014078 | SEQ ID NO 163 |
| NM_014109 | SEQ ID NO 164 |
| NM_014321 | SEQ ID NO 165 |
| NM_014363 | SEQ ID NO 166 |
| NM_014750 | SEQ ID NO 167 |
| NM_014754 | SEQ ID NO 168 |
| NM_014791 | SEQ ID NO 169 |
| NM_014875 | SEQ ID NO 170 |
| NM_014889 | SEQ ID NO 171 |
| NM_014968 | SEQ ID NO 172 |
| NM_015416 | SEQ ID NO 173 |
| NM_015417 | SEQ ID NO 174 |
| NM_015434 | SEQ ID NO 175 |
| NM_015984 | SEQ ID NO 176 |
| NM_016337 | SEQ ID NO 177 |
| NM_016359 | SEQ ID NO 178 |
| NM_016448 | SEQ ID NO 179 |
| NM_016569 | SEQ ID NO 180 |
| NM_016577 | SEQ ID NO 181 |
| NM_017779 | SEQ ID NO 182 |
| NM_018004 | SEQ ID NO 183 |
| NM_018098 | SEQ ID NO 184 |
| NM_018104 | SEQ ID NO 185 |
| NM_018120 | SEQ ID NO 186 |
| NM_018136 | SEQ ID NO 187 |
| NM_018265 | SEQ ID NO 188 |
| NM_018354 | SEQ ID NO 189 |
| NM_018401 | SEQ ID NO 190 |
| NM_018410 | SEQ ID NO 191 |
| NM_018454 | SEQ ID NO 192 |
| NM_018455 | SEQ ID NO 193 |
| NM_019013 | SEQ ID NO 194 |
| NM_020166 | SEQ ID NO 195 |
| NM_020188 | SEQ ID NO 196 |
| NM_020244 | SEQ ID NO 197 |
| NM_020386 | SEQ ID NO 198 |
| NM_020675 | SEQ ID NO 199 |
| NM_020974 | SEQ ID NO 200 |
| R70506_RC | SEQ ID NO 201 |
| U45975 | SEQ ID NO 202 |
| U58033 | SEQ ID NO 203 |
| U82987 | SEQ ID NO 204 |
| U96131 | SEQ ID NO 205 |
| X05610 | SEQ ID NO 206 |
| X94232 | SEQ ID NO 207 |
| Contig753_RC | SEQ ID NO 208 |
| Contig1778_RC | SEQ ID NO 209 |
| Contig2399_RC | SEQ ID NO 210 |
| Contig2504_RC | SEQ ID NO 211 |
| Contig3902_RC | SEQ ID NO 212 |
| Contig4595 | SEQ ID NO 213 |
| Contig8581_RC | SEQ ID NO 214 |
| Contig13480_RC | SEQ ID NO 215 |
| Contig17359_RC | SEQ ID NO 216 |
| Contig20217_RC | SEQ ID NO 217 |
| Contig21812_RC | SEQ ID NO 218 |
| Contig24252_RC | SEQ ID NO 219 |
| Contig25055_RC | SEQ ID NO 220 |
| Contig25343_RC | SEQ ID NO 221 |
| Contig25991 | SEQ ID NO 222 |
| Contig27312_RC | SEQ ID NO 223 |
| Contig28552_RC | SEQ ID NO 5 |
| Contig32125_RC | SEQ ID NO 224 |
| Contig32185_RC | SEQ ID NO 225 |
| Contig33814_RC | SEQ ID NO 226 |
| Contig34634_RC | SEQ ID NO 227 |
| Contig35251_RC | SEQ ID NO 228 |
| Contig37063_RC | SEQ ID NO 229 |
| Contig37598 | SEQ ID NO 230 |
| Contig38288_RC | SEQ ID NO 231 |
| Contig40128_RC | SEQ ID NO 232 |
| Contig40831_RC | SEQ ID NO 233 |
| Contig41413_RC | SEQ ID NO 234 |
| Contig41887_RC | SEQ ID NO 235 |
| Contig42421_RC | SEQ ID NO 236 |
| Contig43747_RC | SEQ ID NO 237 |
| Contig44064_RC | SEQ ID NO 238 |
| Contig44289_RC | SEQ ID NO 239 |
| Contig44799_RC | SEQ ID NO 240 |
| Contig45347_RC | SEQ ID NO 241 |
| Contig45816_RC | SEQ ID NO 242 |
| Contig46218_RC | SEQ ID NO 6 |
| Contig46223_RC | SEQ ID NO 243 |
| Contig46653_RC | SEQ ID NO 244 |
| Contig46802_RC | SEQ ID NO 245 |
| Contig47405_RC | SEQ ID NO 246 |
| Contig48328_RC | SEQ ID NO 247 |
| Contig49670_RC | SEQ ID NO 248 |
| Contig50106_RC | SEQ ID NO 249 |
| Contig50410 | SEQ ID NO 250 |
| Contig50802_RC | SEQ ID NO 251 |
| Contig51464_RC | SEQ ID NO 252 |
| Contig51519_RC | SEQ ID NO 253 |
| Contig51749_RC | SEQ ID NO 254 |
| Contig51963 | SEQ ID NO 255 |
| Contig53226_RC | SEQ ID NO 256 |
| Contig53268_RC | SEQ ID NO 257 |
| Contig53646_RC | SEQ ID NO 258 |
| Contig53742_RC | SEQ ID NO 259 |
| Contig55188_RC | SEQ ID NO 260 |
| Contig55313_RC | SEQ ID NO 261 |
| Contig55377_RC | SEQ ID NO 262 |
| Contig55725_RC | SEQ ID NO 263 |
| Contig55813_RC | SEQ ID NO 264 |
| Contig55829_RC | SEQ ID NO 265 |
| Contig56457_RC | SEQ ID NO 266 |
| Contig57595 | SEQ ID NO 267 |
| Contig57864_RC | SEQ ID NO 268 |
| Contig58368_RC | SEQ ID NO 269 |
| Contig60864_RC | SEQ ID NO 270 |
| Contig63102_RC | SEQ ID NO 271 |
| Contig63649_RC | SEQ ID NO 272 |
| Contig64688 | SEQ ID NO 273 |

[0113] TABLE 2
70 Preferred prognosis markers drawn from Table 1.

| GenBank | | | |
|---|---|---|---|
| Accession Number/ | | | |
| Contig Number | Correlation | Sequence Name | Description |
| AL080059 | −0.527150 | | Homo sapiens mRNA for |
| | | | KIAA1750 protein, partial cds |
| Contig63649_RC | −0.468130 | | ESTs |
| Contig46218_RC | −0.432540 | | ESTs |
| NM_016359 | −0.424930 | LOC51203 | clone HQ0310 PRO0310p1 |
| AA555029_RC | −0.424120 | | ESTs |
| NM_003748 | 0.420671 | ALDH4 | aldehyde dehydrogenase 4 |
| | | | (glutamate gamma-semialdehyde |
| | | | dehydrogenase; pyrroline-5- |
| | | | carboxylate dehydrogenase) |
| Contig38288_RC | −0.414970 | | ESTs, Weakly similar to ISHUSS |
| | | | protein disulfide-isomerase |
| | | | [H. sapiens] |
| NM_003862 | 0.410964 | FGF18 | fibroblast growth factor 18 |
| Contig28552_RC | −0.409260 | | Homo sapiens mRNA; cDNA |
| | | | DKFZp434C0931 (from clone |
| | | | DKFZp434C0931); partial cds |
| Contig32125_RC | 0.409054 | | ESTs |
| U82987 | 0.407002 | BBC3 | Bcl-2 binding component 3 |
| AL137718 | −0.404980 | | Homo sapiens mRNA; cDNA |
| | | | DKFZp434C0931 (from clone |
| | | | DKFZp434C0931); partial cds |
| AB037863 | 0.402335 | KIAA1442 | KIAA1442 protein |
| NM_020188 | −0.400070 | DC13 | DC13 protein |
| NM_020974 | 0.399987 | CEGP1 | CEGP1 protein |
| NM_000127 | −0.399520 | EXT1 | exostoses (multiple) 1 |
| NM_002019 | −0.398070 | FLT1 | fms-related tyrosine kinase 1 |
| | | | (vascular endothelial growth |
| | | | factor/vascular permeability factor |
| | | | receptor) |
| NM_002073 | −0.395460 | GNAZ | guanine nucleotide binding protein |
| | | | (G protein), alpha z polypeptide |
| NM_000436 | −0.392120 | OXCT | 3-oxoacid CoA transferase |
| NM_004994 | −0.391690 | MMP9 | matrix metalloproteinase 9 |
| | | | (gelatinase B, 92 kD gelatinase, |
| | | | 92 kD type IV collagenase) |
| Contig55377_RC | 0.390600 | | ESTs |
| Contig35251_RC | −0.390410 | | Homo sapiens cDNA: FLJ22719 |
| | | | fis, clone HSI14307 |
| Contig25991 | −0.390370 | ECT2 | epithelial cell transforming |
| | | | sequence 2 oncogene |
| NM_003875 | −0.386520 | GMPS | guanine monphosphate synthetase |
| NM_006101 | −0.385890 | HEC | highly expressed in cancer, rich in |
| | | | leucine heptad repeats |
| NM_003882 | 0.384479 | WISP1 | WNT1 inducible signaling |
| | | | pathway protein 1 |
| NM_003607 | −0.384390 | PK428 | Ser-Thr protein kinase related to |
| | | | the myotonic dystrophy protein |
| | | | kinase |
| AF073519 | −0.383340 | SERF1A | small EDRK-rich factor 1A |
| | | | (telomeric) |
| AF052162 | −0.380830 | FLJ12443 | hypothetical protein FLJ12443 |
| NM_000849 | 0.380831 | GSTM3 | glutathione S-transferase M3 |
| | | | (brain) |
| Contig32185_RC | −0.379170 | | Homo sapiens cDNA FLJ13997 |
| | | | fis, clone Y79AA1002220 |
| NM_016577 | −0.376230 | RAB6B | RAB6B, member RAS oncogene |
| | | | family |
| Contig48328_RC | 0.375252 | | ESTs, Weakly similar to T17248 |
| | | | hypothetical protein |
| | | | DKFZp586G1122.1 [H. sapiens] |
| Contig46223_RC | 0.374289 | | ESTs |
| NM_015984 | −0.373880 | UCH37 | ubiquitin C-terminal hydrolase |
| | | | UCH37 |
| NM_006117 | 0.373290 | PECI | peroxisomal D3,D2-enoyl-CoA |
| | | | isomerase |
| AK000745 | −0.373060 | | Homo sapiens cDNA FLJ20738 |
| | | | fis, clone HEP08257 |
| Contig40831_RC | −0.372930 | | ESTs |
| NM_003239 | 0.371524 | TGFB3 | transforming growth factor, beta 3 |
| NM_014791 | −0.370860 | KIAA0175 | KIAA0175 gene product |
| X05610 | −0.370860 | COL4A2 | collagen, type IV, alpha 2 |
| NM_016448 | −0.369420 | L2DTL | L2DTL protein |
| NM_018401 | 0.368349 | HSA250839 | gene for serine/threonine protein |
| | | | kinase |
| NM_000788 | −0.367700 | DCK | deoxycytidine kinase |
| Contig51464_RC | −0.367450 | FLJ22477 | hypothetical protein FLJ22477 |
| AL080079 | −0.367390 | DKFZP564D0462 | hypothetical protein |
| | | | DKFZp564D0462 |
| NM_006931 | −0.366490 | SLC2A3 | solute carrier family 2 (facilitated |
| | | | glucose transporter), member 3 |
| AF257175 | 0.365900 | | Homo sapiens hepatocellular |
| | | | carcinoma-associated antigen 64 |
| | | | (HCA64) mRNA, complete cds |
| NM_014321 | −0.365810 | ORC6L | origin recognition complex, |
| | | | subunit 6 (yeast homolog)-like |
| NM_002916 | −0.365590 | RFC4 | replication factor C (activator 1) 4 |
| | | | (37 kD) |
| Contig55725_RC | −0.365350 | | ESTs, Moderately similar to |
| | | | T50635 hypothetical protein |
| | | | DKFZp762L0311.1 [H. sapiens] |
| Contig24252_RC | −0.364990 | | ESTs |
| AF201951 | 0.363953 | CFFM4 | high affinity immunoglobulin |
| | | | epsilon receptor beta subunit |
| NM_005915 | −0.363850 | MCM6 | minichromosome maintenance |
| | | | deficient (mis5, S. pombe) 6 |
| NM_001282 | 0.363326 | AP2B1 | adaptor-related protein complex 2, |
| | | | beta 1 subunit |
| Contig56457_RC | −0.361650 | TMEFF1 | transmembrane protein with EGF- |
| | | | like and two follistatin-like |
| | | | domains 1 |
| NM_000599 | −0.361290 | IGFBP5 | insulin-like growth factor binding |
| | | | protein 5 |
| NM_020386 | −0.360780 | LOC57110 | H-REV107 protein-related protein |
| NM_014889 | −0.360040 | MP1 | metalloprotease 1 (pitrilysin |
| | | | family) |
| AF055033 | −0.359940 | IGFBP5 | insulin-like growth factor binding |
| | | | protein 5 |
| NM_006681 | −0.359700 | NMU | neuromedin U |
| NM_007203 | −0.359570 | AKAP2 | A kinase (PRKA) anchor protein 2 |
| Contig63102_RC | 0.359255 | FLJ11354 | hypothetical protein FLJ11354 |
| NM_003981 | −0.358260 | PRC1 | protein regulator of cytokinesis 1 |
| Contig20217_RC | −0.357880 | | ESTs |
| NM_001809 | −0.357720 | CENPA | centromere protein A (17 kD) |
| Contig2399_RC | −0.356600 | SM-20 | similar to rat smooth muscle |
| | | | protein SM-20 |
| NM_004702 | −0.356600 | CCNE2 | cyclin E2 |
| NM_007036 | −0.356540 | ESM1 | endothelial cell-specific molecule 1 |
| NM_018354 | −0.356000 | FLJ11190 | hypothetical protein FLJ11190 |

[0114] Three of the most strongly correlated markers, AL137718 (SEQ ID NO: 4), Contig28552 (SEQ ID NO: 5) and Contig46218 (SEQ ID NO: 6) were markers whose upregulation, in comparison to their expression in nontumor cells, correlated with a poor prognosis. A BLAT search of one of the markers, AL137718, revealed a predicted gene that overlapped a second marker, Contig28552. Using these sequences, and the sequence of Contig46218, to design appropriate RT-PCR and sequencing primers (see Example 1), the full-length DIAPH3 cDNA was sequenced and elucidated.

[0115] Because the DIAPH3 cDNA sequence was identified using the sequences of three markers whose expression is strongly correlated with the presence of breast cancer and a poor prognosis, the overexpression of DIAPH3, compared to expression in normal cells, will also correlate strongly with a poor prognosis. DIAPH3 is therefore a useful breast cancer diagnostic and prognostic marker.

[0116] Thus, in one embodiment, the invention provides a method of diagnosing an individual as having breast cancer comprising comparing the level of expression of a nucleic acid encoding SEQ ID NO: 3 in a breast cell sample from said individual to a control level of expression of said nucleic acid encoding SEQ ID NO: 3; and classifying said individual as having breast cancer if said level of expression of said nucleic acid in a breast cell sample from said individual is greater than said control level of expression. In a specific embodiment, said patient is classified as having breast cancer if the logarithm of the ratio of said level of expression of a nucleic acid encoding SEQ ID NO: 3 in a breast cell sample from said individual to said control level of expression is 0.3 or greater. In these, and other, embodiments, a control level of expression may be, for example, the level of expression of a nucleic acid encoding SEQ ID NO: 3 in a breast cell sample from an individual known not to have breast cancer, or a standard level of expression known for non-malignant breast cell samples in a species or population. In a specific embodiment, said level of expression of a nucleic acid encoding SEQ ID NO: 3 in a sample derived from breast cells is determined by hybridizing said nucleic acid with an oligonucleotide complementary and hybridizable to nucleotides 1-2384 or nucleotides 2927-4331 of SEQ ID NO: 1, and determining the amount of said hybridization. In another specific embodiment, said level of expression of a nucleic acid encoding SEQ ID NO: 3 in a sample derived from breast cells is determined by hybridizing said nucleic acid with an oligonucleotide complementary and hybridizable to nucleotides 1-862, 2927-3045, or 3412-3929 of SEQ ID NO: 1, and determining the amount of said hybridization.

[0117] In another embodiment of the invention, the prognosis of a breast cancer patient may be predicted by a method comprising: (a) determining the level of expression of a nucleic acid encoding SEQ ID NO: 3 in a sample derived from breast cancer tumor cells from said patient; (b) comparing the level of expression in said sample to a control level of expression; and (c) predicting that the patient will have a poor prognosis if said level of expression in the tumor sample is higher than the level of expression in the control. In a more specific embodiment, said level of expression of a nucleic acid encoding SEQ ID NO: 3 in said sample is higher than the level of expression in said control. In a preferred embodiment, the level in said sample is significantly higher than the level in said control. In a preferred embodiment, a first level is “significantly higher” than a second level when the log ratio of the first level to the second level is at least 0.3. In a more specific embodiment of the above method, said determining is accomplished by hybridizing said nucleic acids in a sample to an oligonucleotide, wherein said oligonucleotide hybridizable to SEQ ID NO: 1 or its complement; and determining the amount of hybridized oligonucleotide. In a more specific embodiment, the sequence of said oligonucleotide is not found in AL137718, Contig28552 or Contig46218; and determining the amount of hybridized oligonucleotide. In another more specific embodiment, said level of expression of a nucleic acid encoding SEQ ID NO: 3 in a sample derived from breast cells is determined by hybridizing said nucleic acid with an oligonucleotide complementary and hybridizable to nucleotides 1-2384 or nucleotides 2927-4331 of SEQ ID NO: 1, and determining the amount of said hybridization, wherein said amount of hybridization indicates said level of expression. In another more specific embodiment, said level of expression of a nucleic acid encoding SEQ ID NO: 3 in a sample derived from breast cells is determined by hybridizing said nucleic acid with an oligonucleotide complementary and hybridizable to nucleotides 1-862, 2927-3045, or 3412-3929 of SEQ ID NO: 1, and determining the amount of said hybridization, wherein said amount of hybridization indicates said level of expression. In another specific embodiment, said oligonucleotide is a probe on a microarray. In a more specific example, said oligonucleotide is one of a plurality of probes on a microarray, wherein said plurality comprises probes complementary and hybridizable to nucleic acids encoded by five different breast cancer-related markers that do not encode SEQ ID NO: 3. In another specific embodiment, said oligonucleotide is one of a plurality of probes on a microarray, wherein said plurality comprises probes complementary and hybridizable to nucleic acids encoded by twenty different breast cancer-related markers that do not encode SEQ ID NO: 3. Such markers may be any marker identified as being related to or indicative of the presence of breast cancer. Preferably, said 5 or 20 different breast cancer-related markers are selected from the markers disclosed in International Publication No. WO 02/103320, published Dec. 27, 2002, entitled “Diagnosis and Prognosis of Breast Cancer Patients,” which is incorporated by reference herein in its entirety. For example, in one preferred embodiment, said five or twenty different breast cancer-related markers are present in Table 1. In another preferred embodiment, said five or twenty different breast cancer-related markers are present in Table 2. In another preferred embodiment, said 20 different breast cancer-related markers have the following GenBank Accession Numbers or Contig Numbers: AL080059; Contig63649_RC; Contig46218_RC; NM_{—}016359; AA555029_RC; NM_{—}003748; Contig38288_RC; NM_{—}003862; Contig28552_RC; Contig32125_RC; U82987; AL137718; AB037863; KIAA1442; NM_{—}020188; NM_{—}020974; NM_{—}000127; NM_{—}002019; NM_{—}002073; and NM_{—}000436. Contig sequences were obtained from Phil Green EST contigs, which is a collection of EST contigs assembled by Dr. Phil Green et al at the University of Washington (Ewing and Green, Nat. Genet. 25(2):232-4 (2000)), available on the Internet at phrap.org/est_assembly/index.html. “Breast cancer-related” means that the expression of the marker in breast cancer tumor cells is correlated with the breast cancer state and is significantly different than the marker's expression in normal cells.

[0118] Levels of DIAPH3 protein, alone or in combination with other proteins encoded by breast cancer-related marker genes, may also be determined in order to diagnose, or to predict the prognosis of, a breast cancer patient. For example, monitoring of levels of proteins encoded by breast cancer-related marker genes can be carried out by constructing a microarray in which binding sites comprise immobilized, preferably monoclonal, antibodies specific to a plurality of protein species encoded by the marker genes. Preferably, antibodies are present for a substantial fraction of the proteins encoded by the breast cancer-related marker genes. Methods for making monoclonal antibodies are well known (see, e.g., Harlow and Lane, 1988, ANTIBODIES: A LABORATORY MANUAL, Cold Spring Harbor, N.Y., which is incorporated in its entirety for all purposes). In a preferred embodiment, monoclonal antibodies are raised against synthetic peptide fragments designed based on genomic sequence of the cell. With such an antibody array, proteins from the cell are contacted to the array and their binding is assayed with assays known in the art.

[0119] Thus, in one embodiment, the invention provides a method of diagnosing an individual as having breast cancer comprising comparing the level of a protein the amino acid sequence of which consists of SEQ ID NO: 3 in a sample derived from breast cells of said individual to a control level of said protein; and classifying said individual as having breast cancer if said level of protein in said sample from said individual is higher than said control level of said protein. In a more specific embodiment, said individual is classified as having breast cancer if said level of level of a protein the amino acid sequence of which consists of SEQ ID NO: 3 in a sample derived from breast cells of said individual is higher than said control level of said protein. In another embodiment of the invention, the prognosis of a breast cancer patient may be predicted by determining the level of a protein comprising SEQ ID NO: 3 in sample derived from breast cancer tumor cells of said patient; comparing the level of said protein in said sample to a control level of said protein; and predicting that the patient will have a poor prognosis if said level of said protein in said sample is significantly higher than is significantly higher than said control level of said protein. In a specific embodiment, said determining is carried out by a method comprising: (a) contacting said protein comprising SEQ ID NO: 3 from said sample derived from breast cancer tumor cells with an antibody that specifically binds said protein; and (b) determining the amount of antibody bound to said protein, wherein said amount of antibody bound to said protein indicates said level of said protein in said breast cancer tumor sample. In these, and other, embodiments, a control may be, for example, the level of DIAPH3 in a breast cell sample from an individual known not to have breast cancer.

[0120] It should be noted that, in the present invention, the expression of the DIAPH3 gene (i.e., the gene encoding SEQ ID NO: 3) may not be the sole indicator used in the diagnosis or prognosis of breast cancer. The expression of one of the nucleotide or amino acid sequences of the invention may be used in conjunction with, and correlated to, any other biochemical or clinical indicator of the presence, absence, or prognosis of a breast cancer. Thus, the terms “diagnosis” and “prognosis,” as used herein, encompass the use of the nucleotide or amino acid sequences described herein in screening for breast cancer, in determining the likelihood of the presence of breast cancer, and in supporting a diagnosis or prognosis of breast cancer in combination with other indicators of breast cancer.

[0121] The invention also provides kits for the facilitation of the diagnostic and/or prognostic methods of the invention. Thus, in one embodiment, the invention provides a kit for the diagnosis and/or prognosis of breast cancer, comprising in a container an oligonucleotide that hybridizes to the DIAPH3 coding sequence (i.e., SEQ ID NO: 2) under stringent conditions, wherein said oligonucleotide is at least 12 nucleotides in length and wherein the sequence of said oligonucleotide is not wholly present in Contig28552, Contig46218, or AL137718. In another embodiment, the invention provides a kit comprising in a container an oligonucleotide that hybridizes to SEQ ID NO: 1 under stringent conditions, wherein said oligonucleotide is at least 12 nucleotides in length, and is complementary and hybridizable to nucleotides 1-862, 2927-3045, or 3412-3929 of SEQ ID NO: 1. In a more specific embodiment, said oligonucleotide is a probe on a microarray. In an even more specific embodiment, said microarray comprises at least five breast cancer-related markers other than a nucleotide sequence that encodes SEQ ID NO: 3. In another embodiment, the invention provides a kit for the diagnosis and/or prognosis of breast cancer, comprising in a first container an polynucleotide that hybridizes to a nucleotide sequence that encodes SEQ ID NO: 3 under stringent conditions, wherein said polynucleotide is at least 3700 nucleotides in length, and further comprising in a second container a known amount of a nucleic acid comprising SEQ ID NO: 2. In another embodiment, the invention provides a kit comprising in one or more containers a forward primer and a reverse primer that amplify at least a portion of the nucleotide sequence of SEQ ID NO: 1 when used in the polymerase chain reaction, wherein said forward primer and said reverse primer are complementary and hybridizable to nucleotides 1-862, 2927-3045, or 3412-3929 of SEQ ID NO: 1 or the complementary sequence thereof. In another embodiment, the invention provides a kit comprising in a container an antibody that binds to a protein the amino acid sequence of which consists of SEQ ID NO: 3, or to a fragment of said protein, and further comprising in a second container a known amount of said protein or a fragment thereof to which said antibody binds. In another embodiment, the invention provides an article of manufacture comprising a container comprising a purified protein comprising SEQ ID NO: 3.

### 5.8.1 Sample Collection

[0122] In the present invention, target polynucleotide molecules are extracted from a sample taken from an individual afflicted with breast cancer, or suspected of being afflicted with breast cancer (in a diagnostic scenario). The sample may be collected in any clinically acceptable manner, but must be collected such that marker-derived polynucleotides (i.e., RNA) are preserved. mRNA or nucleic acids derived therefrom (i.e., cDNA or amplified DNA) are preferably labeled distinguishably from standard or control polynucleotide molecules, and both are simultaneously or independently hybridized to a microarray comprising some or all of the markers or marker sets or subsets described above. Alternatively, mRNA or nucleic acids derived therefrom may be labeled with the same label as the standard or control polynucleotide molecules, wherein the intensity of hybridization of each at a particular probe is compared. A sample may comprise any clinically relevant tissue sample, such as a tumor biopsy or fine needle aspirate, or a sample of bodily fluid, such as blood, plasma, serum, lymph, ascitic fluid, cystic fluid, urine or nipple exudate. The sample may be taken from a human, or, in a veterinary context, from non-human animals such as ruminants, horses, swine or sheep, or from domestic companion animals such as felines and canines.

[0123] Methods for preparing total and poly(A)+ RNA are well known and are described generally in Sambrook et al., MOLECULAR CLONING: A LABORATORY MANUAL (2nd Ed.), Vols. 1-3, Cold Spring Harbor Laboratory, Cold Spring Harbor, N.Y. (1989)) and Ausubel et al., CURRENT PROTOCOLS IN MOLECULAR BIOLOGY, Vol. 2, Current Protocols Publishing, New York (1994)).

[0124] RNA may be isolated from eukaryotic cells by procedures that involve lysis of the cells and denaturation of the proteins contained therein. Cells of interest include wild-type cells (i.e., non-cancerous), drug-exposed wild-type cells, tumor- or tumor-derived cells, modified cells, normal or tumor cell line cells, and drug-exposed modified cells.

[0125] Additional steps may be employed to remove DNA. Cell lysis may be accomplished with a nonionic detergent, followed by microcentrifugation to remove the nuclei and hence the bulk of the cellular DNA. In one embodiment, RNA is extracted from cells of the various types of interest using guanidinium thiocyanate lysis followed by CsCl centrifugation to separate the RNA from DNA (Chirgwin et al., Biochemistry 18:5294-5299 (1979)). Poly(A)+ RNA is selected by selection with oligo-dT cellulose (see Sambrook et al., MOLECULAR CLONING: A LABORATORY MANUAL (2nd Ed.), Vols. 1-3, Cold Spring Harbor Laboratory, Cold Spring Harbor, N.Y. (1989). Alternatively, separation of RNA from DNA can be accomplished by organic extraction, for example, with hot phenol or phenol/chloroform/isoamyl alcohol.

[0126] If desired, RNase inhibitors may be added to the lysis buffer. Likewise, for certain cell types, it may be desirable to add a protein denaturation/digestion step to the protocol.

[0127] For many applications, it is desirable to preferentially enrich mRNA with respect to other cellular RNAs, such as transfer RNA (tRNA) and ribosomal RNA (rRNA). Most mRNAs contain a poly(A) tail at their 3′ end. This allows them to be enriched by affinity chromatography, for example, using oligo(dT) or poly(U) coupled to a solid support, such as cellulose or Sephadex™ (see Ausubel et al., CURRENT PROTOCOLS IN MOLECULAR BIOLOGY, Vol. 2, Current Protocols Publishing, New York (1994). Once bound, poly(A)+ mRNA is eluted from the affinity column using 2 mM EDTA/0.1% SDS.

[0128] The sample of RNA can comprise a plurality of different mRNA molecules, each different mRNA molecule having a different nucleotide sequence. In a specific embodiment, the mRNA molecules in the RNA sample comprise at least 100 different nucleotide sequences. More preferably, the mRNA molecules of the RNA sample comprise mRNA molecules corresponding to each of the marker genes. In another specific embodiment, the RNA sample is a mammalian RNA sample.

[0129] In a specific embodiment, total RNA or mRNA from cells are used in the methods of the invention. The source of the RNA can be cells of a plant or animal, human, mammal, primate, non-human animal, dog, cat, mouse, rat, bird, yeast, eukaryote, prokaryote, etc. In specific embodiments, the method of the invention is used with a sample containing total mRNA or total RNA from 1×10⁶ cells or less. In another embodiment, proteins can be isolated from the foregoing sources, by methods known in the art, for use in expression analysis at the protein level.

[0130] Probes to the homologs of the marker sequences disclosed herein can be employed preferably wherein non-human nucleic acid is being assayed.

### 5.8.2 Determination of DIAPH3 Gene Expression Levels

### 5.8.2.1 General Methods

[0131] The expression levels of DIAPH3, and of any other marker genes, in a sample may be determined by any means known in the art. The expression level(s) may be determined by isolating and determining the level (i.e., amount) of nucleic acid transcribed from DIAPH3 and from the other marker genes. Alternatively, or additionally, the level of DIAPH3, alone or in combination with proteins translated from mRNA transcribed from any other marker gene(s), may be determined.

[0132] The level of expression of DIAPH3 and other marker genes can be accomplished by determining the amount of mRNA, or polynucleotides derived therefrom, present in a sample. Any method for determining RNA levels can be used. For example, RNA is isolated from a sample and separated on an agarose gel. The separated RNA is then transferred to a solid support, such as a filter. Nucleic acid probes representing one or more markers are then hybridized to the filter by northern hybridization, and the amount of marker-derived RNA is determined. Such determination can be visual, or machine-aided, for example, by use of a densitometer. Another method of determining RNA levels is by use of a dot-blot or a slot-blot. In this method, RNA, or nucleic acid derived therefrom, from a sample is labeled. The RNA or nucleic acid derived therefrom is then hybridized to a filter containing oligonucleotides derived from one or more marker genes, wherein the oligonucleotides are placed upon the filter at discrete, easily-identifiable locations. Hybridization, or lack thereof, of the labeled RNA to the filter-bound oligonucleotides is determined visually or by densitometer. Polynucleotides can be labeled using a radiolabel or a fluorescent (i.e., visible) label.

[0133] These examples are not intended to be limiting; other methods of determining RNA abundance are known in the art.

[0134] The level of expression of particular marker genes, including DIAPH3, may also be assessed by determining the level of the specific protein expressed from the marker genes. This can be accomplished, for example, by separation of proteins from a sample on a polyacrylamide gel, followed by identification of specific marker-derived proteins using antibodies in a western blot. Alternatively, proteins can be separated by two-dimensional gel electrophoresis systems. Two-dimensional gel electrophoresis is well-known in the art and typically involves isoelectric focusing along a first dimension followed by SDS-PAGE electrophoresis along a second dimension. See, e.g., Hames et al, 1990, GEL ELECTROPHORESIS OF PROTEINS: A PRACTICAL APPROACH, IRL Press, New York; Shevchenko et al., Proc. Nat'l Acad. Sci. U.S.A. 93:1440-1445 (1996); Sagliocco et al., Yeast 12:1519-1533 (1996); Lander, Science 274:536-539 (1996). The resulting electropherograms can be analyzed by numerous techniques, including mass spectrometric techniques, western blotting and immunoblot analysis using polyclonal and monoclonal antibodies.

[0135] Alternatively, marker-derived protein levels can be determined by constructing an antibody microarray in which binding sites comprise immobilized, preferably monoclonal, antibodies specific to a plurality of protein species encoded by the cell genome. Preferably, antibodies are present for a substantial fraction of the marker-derived proteins of interest. Methods for making monoclonal antibodies are well known (see, e.g., Harlow and Lane, 1988, ANTIBODIES: A LABORATORY MANUAL, Cold Spring Harbor, N.Y., which is incorporated in its entirety for all purposes). In one embodiment, monoclonal antibodies are raised against synthetic peptide fragments designed based on genomic sequence of the cell. With such an antibody array, proteins from the cell are contacted to the array. and their binding is assayed with assays known in the art. Generally, the expression, and the level of expression, of proteins of diagnostic or prognostic interest can be detected through immunohistochemical staining of tissue slices or sections.

[0136] Finally, expression of marker genes in a number of tissue specimens may be characterized using a “tissue array” (Kononen et al., Nat. Med 4(7):844-7 (1998)). In a tissue array, multiple tissue samples are assessed on the same microarray. The arrays allow in situ detection of RNA and protein levels; consecutive sections allow the analysis of multiple samples simultaneously.

### 5.8.2.2 Arrays

[0137] In preferred embodiments, polynucleotide microarrays are used to measure expression so that the expression status of DIAPH3, alone or in combination with any other breast cancer-related markers, are assessed simultaneously. As used herein, “DIAPH3-derived probe” means a probe the sequence of which is found in DIAPH3, whether in the coding or noncoding region. In a specific embodiment, the invention provides for oligonucleotide or cDNA arrays comprising probes hybridizable to DIAPH3 and to at least five other breast cancer-related markers. In another specific embodiment, the invention provides for oligonucleotide or cDNA arrays comprising probes hybridizable to DIAPH3 and to at least 20 other breast cancer-related markers. In another specific embodiment, the invention provides for oligonucleotide or cDNA arrays comprising probes hybridizable to DIAPH3, wherein said microarray also comprises probes to markers that can distinguish at least one other cancer-related phenotype. In a more specific example, said cancer-related phenotype is ER status (i.e., presence or absence of the estrogen receptor) or BRCA1 status (i.e., whether the breast cancer-associated mutation is in the BRCA1 gene or is sporadic). In another more specific example, said cancer-related phenotype is a phenotype associated with a cancer other than breast cancer. In yet another specific embodiment, the microarray is a commercially-available cDNA microarray that comprises at least one probe the sequence of which is found in DIAPH3. Preferably, such a commercially-available cDNA microarray comprises at least five other breast cancer-related markers. However, such a microarray may, comprise probes derived from 5, 10, 15, 25, 50, 100, 150, 250, 500, 1000 or more breast cancer-related markers, including probes derived from DIAPH3. In a specific embodiment of the microarrays used in the methods disclosed herein, the probes derived from breast cancer-related markers, including DIAPH3-derived probes, make up at least 50%, 60%, 70%, 80%, 90%, 95% or 98% of the probes on the microarray.

[0138] General methods pertaining to the construction of microarrays comprising the marker sets and/or subsets above are described in the following sections.

### 5.8.2.2.1 Construction of Microarrays

[0139] Microarrays are prepared by selecting probes which comprise a polynucleotide sequence, and then immobilizing such probes to a solid support or surface. For example, the probes may comprise DNA sequences, RNA sequences, or copolymer sequences of DNA and RNA. The polynucleotide sequences of the probes may also comprise DNA and/or RNA analogues, or combinations thereof. For example, the polynucleotide sequences of the probes may be full or partial fragments of genomic DNA. The polynucleotide sequences of the probes may also be synthesized nucleotide sequences, such as synthetic oligonucleotide sequences. The probe sequences can be synthesized either enzymatically in vivo, enzymatically in vitro (e.g., by PCR), or non-enzymatically in vitro.

[0140] The probe or probes used in the methods of the invention are preferably immobilized to a solid support which may be either porous or non-porous. For example, the probes of the invention may be polynucleotide sequences which are attached to a nitrocellulose or nylon membrane or filter covalently at either the 3′ or the 5′ end of the polynucleotide. Such hybridization probes are well known in the art (see, e.g., Sambrook et al., MOLECULAR CLONING—A LABORATORY MANUAL (2nd Ed.), Vols. 1-3, Cold Spring Harbor Laboratory, Cold Spring Harbor, N.Y. (1989). Alternatively, the solid support or surface may be a glass or plastic surface. In a particularly preferred embodiment, hybridization levels are measured to microarrays of probes consisting of a solid phase on the surface of which are immobilized a population of polynucleotides, such as a population of DNA or DNA mimics, or, alternatively, a population of RNA or RNA mimics. The solid phase may be a nonporous or, optionally, a porous material such as a gel.

[0141] In preferred embodiments, a microarray comprises a support or surface with an ordered array of binding (e.g., hybridization) sites or “probes” each representing one of the markers described herein. Preferably the microarrays are addressable arrays, and more preferably positionally addressable arrays. More specifically, each probe of the array is preferably located at a known, predetermined position on the solid support such that the identity (i.e., the sequence) of each probe can be determined from its position in the array (i.e., on the support or surface). In preferred embodiments, each probe is covalently attached to the solid support at a single site.

[0142] Microarrays can be made in a number of ways, of which several are described below. However produced, microarrays share certain characteristics. The arrays are reproducible, allowing multiple copies of a given array to be produced and easily compared with each other. Preferably, microarrays are made from materials that are stable under binding (e.g., nucleic acid hybridization) conditions. The microarrays are preferably small, e.g., between 1 cm² and 25 cm², between 12 cm² and 13 cm², or 3 cm². However, larger arrays are also contemplated and may be preferable, e.g., for use in screening arrays. Preferably, a given binding site or unique set of binding sites in the microarray will specifically bind (e.g., hybridize) to the product of a single gene in a cell (e.g., to a specific mRNA, or to a specific cDNA derived therefrom). However, in general, other related or similar sequences will cross hybridize to a given binding site.

[0143] The microarrays of the present invention include one or more test probes, each of which has a polynucleotide sequence that is complementary to a subsequence of RNA or DNA to be detected. Preferably, the position of each probe on the solid surface is known. Indeed, the microarrays are preferably positionally addressable arrays. Specifically, each probe of the array is preferably located at a known, predetermined position on the solid support such that the identity (i.e., the sequence) of each probe can be determined from its position on the array (i.e., on the support or surface).

[0144] According to the invention, the microarray is an array (i.e., a matrix) in which each position represents one of the markers described herein. For example, each position can contain a DNA or DNA analogue based on genomic DNA to which a particular RNA or cDNA transcribed from that genetic marker can specifically hybridize. The DNA or DNA analogue can be, e.g., a synthetic oligomer or a gene fragment.

### 5.8.2.2.2 Preparing Probes for Microarrays

[0145] As noted above, the “probe” to which a particular polynucleotide molecule specifically hybridizes according to the invention contains a complementary genomic polynucleotide sequence. The probes of the microarray preferably consist of nucleotide sequences of no more than 1,000 nucleotides. In some embodiments, the probes of the array consist of nucleotide sequences of 10 to 1,000 nucleotides. In a preferred embodiment, the nucleotide sequences of the probes are in the range of 10-200 nucleotides in length and are genomic sequences of a species of organism, such that a plurality of different probes is present, with sequences complementary and thus capable of hybridizing to the genome of such a species of organism, sequentially tiled across all or a portion of such genome. In other specific embodiments, the probes are in the range of 10-30 nucleotides in length, in the range of 10-40 nucleotides in length, in the range of 20-50 nucleotides in length, in the range of 40-80 nucleotides in length, in the range of 50-150 nucleotides in length, in the range of 80-120 nucleotides in length, and most preferably are 60 nucleotides in length.

[0146] The probes may comprise DNA or DNA “mimics” (e.g., derivatives and analogues) corresponding to a portion of an organism's genome. In another embodiment, the probes of the microarray are complementary RNA or RNA mimics. DNA mimics are polymers composed of subunits capable of specific, Watson-Crick-like hybridization with DNA, or of specific hybridization with RNA. The nucleic acids can be modified at the base moiety, at the sugar moiety, or at the phosphate backbone. Exemplary DNA mimics include, e.g., phosphorothioates.

[0147] DNA can be obtained, e.g., by polymerase chain reaction (PCR) amplification of genomic DNA or cloned sequences. PCR primers are preferably chosen based on a known sequence of the genome that will result in amplification of specific fragments of genomic DNA. Computer programs that are well known in the art are useful in the design of primers with the required specificity and optimal amplification properties, such as Oligo version 5.0 (National Biosciences). Typically each probe on the microarray will be between 10 bases and 50,000 bases, usually between 300 bases and 1,000 bases in length. PCR methods are well known in the art, and are described, for example, in Innis et al., eds., PCR PROTOCOLS: A GUIDE TO METHODS AND APPLICATIONS, Academic Press Inc., San Diego, Calif. (1990). It will be apparent to one skilled in the art that controlled robotic systems are useful for isolating and amplifying nucleic acids.

[0148] An alternative, preferred means for generating the polynucleotide probes of the microarray is by synthesis of synthetic polynucleotides or oligonucleotides, e.g., using N-phosphonate or phosphoramidite chemistries (Froehler et al., Nucleic Acid Res. 14:5399-5407 (1986); McBride et al., Tetrahedron Lett. 24:246-248 (1983)). Synthetic sequences are typically between about 10 and about 500 bases in length, more typically between about 20 and about 100 bases, and most preferably between about 40 and about 70 bases in length. In some embodiments, synthetic nucleic acids include non-natural bases, such as, but by no means limited to, inosine. As noted above, nucleic acid analogues may be used as binding sites for hybridization. An example of a suitable nucleic acid analogue is peptide nucleic acid (see, e.g., Egholm et al., Nature 363:566-568 (1993); U.S. Pat. No. 5,539,083).

[0149] Probes are preferably selected using an algorithm that takes into account binding energies, base composition, sequence complexity, cross-hybridization binding energies, and secondary structure (see Friend et al., International Patent Publication WO 01/05935, published Jan. 25, 2001; Hughes et al., Nat. Biotech. 19:342-7 (2001)).

[0150] A skilled artisan will also appreciate that positive control probes, e.g., probes known to be complementary and hybridizable to sequences in the target polynucleotide molecules, and negative control probes, e.g., probes known to not be complementary and hybridizable to sequences in the target polynucleotide molecules, should be included on the array. In one embodiment, positive controls are synthesized along the perimeter of the array. In another embodiment, positive controls are synthesized in diagonal stripes across the array. In still another embodiment, the reverse complement for each probe is synthesized next to the position of the probe to serve as a negative control. In yet another embodiment, sequences from other species of organism are used as negative controls or as “spike-in” controls.

### 5.8.2.2.3 Attaching Probes to the Solid Surface

[0151] The probes are attached to a solid support or surface, which may be made, e.g., from glass, plastic (e.g., polypropylene, nylon), polyacrylamide, nitrocellulose, gel, or other porous or nonporous material. A preferred method for attaching the nucleic acids to a surface is by printing on glass plates, as is described generally by Schena et al., Science 270:467-470 (1995). This method is especially useful for preparing microarrays of cDNA (See also, DeRisi et al., Nature Genetics 14:457-460 (1996); Shalon et al., Genome Res. 6:639-645 (1996); and Schena et al., Proc. Natl. Acad. Sci. U.S.A. 93:10539-11286 (1995)).

[0152] A second preferred method for making microarrays is by making high-density oligonucleotide arrays. Techniques are known for producing arrays containing thousands of oligonucleotides complementary to defined sequences, at defined locations on a surface using photolithographic techniques for synthesis in situ (see, Fodor et al., 1991, Science 251:767-773; Pease et al., 1994, Proc. Natl. Acad. Sci. U.S.A. 91:5022-5026; Lockhart et al., 1996, Nature Biotechnology 14:1675; U.S. Pat. Nos. 5,578,832; 5,556,752; and 5,510,270) or other methods for rapid synthesis and deposition of defined oligonucleotides (Blanchard et al., Biosensors & Bioelectronics 11:687-690). When these methods are used, oligonucleotides (e.g., 60-mers) of known sequence are synthesized directly on a surface such as a derivatized glass slide. Usually, the array produced is redundant, with several oligonucleotide molecules per RNA.

[0153] Other methods for making microarrays, e.g., by masking (Maskos and Southern, 1992, Nuc. Acids. Res. 20:1679-1684), may also be used. In principle, and as noted supra, any type of array, for example, dot blots on a nylon hybridization membrane (see Sambrook et al., MOLECULAR CLONING: A LABORATORY MANUAL (2nd Ed.), Vols. 1-3, Cold Spring Harbor Laboratory, Cold Spring Harbor, N.Y. (1989)) could be used. However, as will be recognized by those skilled in the art, very small arrays will frequently be preferred because hybridization volumes will be smaller.

[0154] In one embodiment, the arrays of the present invention are prepared by synthesizing polynucleotide probes on a support. In such an embodiment, polynucleotide probes are attached to the support covalently at either the 3′ or the 5′ end of the polynucleotide.

[0155] In a particularly preferred embodiment, microarrays of the invention are manufactured by means of an ink jet printing device for oligonucleotide synthesis, e.g., using the methods and systems described by Blanchard in U.S. Pat. No. 6,028,189; Blanchard et al., 1996, Biosensors and Bioelectronics 11:687-690; Blanchard, 1998, in SYNTHETIC DNA ARRAYS IN GENETIC ENGINEERING, Vol. 20, J. K. Setlow, Ed., Plenum Press, New York at pages 111-123. Specifically, the oligonucleotide probes in such microarrays are preferably synthesized in arrays, e.g., on a glass slide, by serially depositing individual nucleotide bases in “microdroplets” of a high surface tension solvent such as propylene carbonate. The microdroplets have small volumes (e.g., 100 pL or less, more preferably 50 pL or less) and are separated from each other on the microarray (e.g., by hydrophobic domains) to form circular surface tension wells which define the locations of the array elements (i.e., the different probes). Microarrays manufactured by this ink-jet method are typically of high density, preferably having a density of at least about 2,500 different probes per 1 cm². The polynucleotide probes are attached to the support covalently at either the 3′ or the 5′ end of the polynucleotide.

### 5.8.2.2.4 Target Polynucleotide Molecules

[0156] The polynucleotide molecules which may be analyzed by the present invention (the “target polynucleotide molecules”) may be from any clinically relevant source, but are expressed RNA or a nucleic acid derived therefrom (e.g., cDNA or amplified RNA derived from cDNA that incorporates an RNA polymerase promoter), including naturally occurring nucleic acid molecules, as well as synthetic nucleic acid molecules. In one embodiment, the target polynucleotide molecules comprise RNA, including, but by no means limited to, total cellular RNA, poly(A)+ messenger RNA (mRNA) or fraction thereof, cytoplasmic mRNA, or RNA transcribed from cDNA (i.e., cRNA; see, e.g., Linsley & Schelter, U.S. Pat. No. 6,271,002, or U.S. Pat. Nos. 5,545,522, 5,891,636, or 5,716,785). Methods for preparing total and poly(A)+ RNA are well known in the art, and are described generally, e.g., in Sambrook et al., MOLECULAR CLONING: A LABORATORY MANUAL (2nd Ed.), Vols. 1-3, Cold Spring Harbor Laboratory, Cold Spring Harbor, N.Y. (1989). In one embodiment, RNA is extracted from cells of the various types of interest in this invention using guanidinium thiocyanate lysis followed by CsCl centrifugation (Chirgwin et al., 1979, Biochemistry 18:5294-5299). In another embodiment, total RNA is extracted using a silica gel-based column, commercially available examples of which include RNeasy (Qiagen, Valencia, Calif.) and StrataPrep (Stratagene, La Jolla, Calif.). In an alternative embodiment, which is preferred for S. cerevisiae, RNA is extracted from cells using phenol and chloroform, as described in Ausubel et al., eds., 1989, CURRENT PROTOCOLS IN MOLECULAR BIOLOGY, Vol III, Green Publishing Associates, Inc., John Wiley & Sons, Inc., New York, at pp. 13.12.1-13.12.5). Poly(A)+ RNA can be selected, e.g., by selection with oligo-dT cellulose or, alternatively, by oligo-dT primed reverse transcription of total cellular RNA. In one embodiment, RNA can be fragmented by methods known in the art, e.g., by incubation with ZnCl2, to generate fragments of RNA. In another embodiment, the polynucleotide molecules analyzed by the invention comprise cDNA, or PCR products of amplified RNA or cDNA.

[0157] In one embodiment, total RNA, mRNA, or nucleic acids derived therefrom, is isolated from a sample taken from a person afflicted with breast cancer. Target polynucleotide molecules that are poorly expressed in particular cells may be enriched using normalization techniques (Bonaldo et al., 1996, Genome Res. 6:791-806).

[0158] As described above, the target polynucleotides are detectably labeled at one or more nucleotides. Any method known in the art may be used to detectably label the target polynucleotides. Preferably, this labeling incorporates the label uniformly along the length of the RNA, and more preferably, the labeling is carried out at a high degree of efficiency. One embodiment for this labeling uses oligo-dT primed reverse transcription to incorporate the label; however, conventional methods of this method are biased toward generating 3′ end fragments. Thus, in a preferred embodiment, random primers (e.g., 9-mers) are used in reverse transcription to uniformly incorporate labeled nucleotides over the full length of the target polynucleotides. Alternatively, random primers may be used in conjunction with PCR methods or T7 promoter-based in vitro transcription methods in order to amplify the target polynucleotides.

[0159] In a preferred embodiment, the detectable label is a luminescent label. For example, fluorescent labels, bio-luminescent labels, chemi-luminescent labels, and colorimetric labels may be used in the present invention. In a highly preferred embodiment, the label is a fluorescent label, such as a fluorescein, a phosphor, a rhodamine, or a polymethine dye derivative. Examples of commercially available fluorescent labels include, for example, fluorescent phosphoramidites such as FluorePrime (Amersham Pharmacia, Piscataway, N.J.), Fluoredite (Millipore, Bedford, Mass.), FAM (ABI, Foster City, Calif.), and Cy3 or Cy5 (Amersham Pharmacia, Piscataway, N.J.). In another embodiment, the detectable label is a radiolabeled nucleotide.

[0160] In a further preferred embodiment, target polynucleotide molecules from a patient sample are labeled differentially from target polynucleotide molecules of a standard. The standard can comprise target polynucleotide molecules from normal individuals (i.e., those not afflicted with breast cancer). In a highly preferred embodiment, the standard comprises target polynucleotide molecules pooled from samples from normal individuals or tumor samples from individuals having sporadic-type breast tumors. In another embodiment, the target polynucleotide molecules are derived from the same individual, but are taken at different time points, and thus indicate the efficacy of a treatment by a change in expression of the markers, or lack thereof, during and after the course of treatment (i.e., chemotherapy, radiation therapy or cryotherapy), wherein a change in the expression of the markers from a poor prognosis pattern to a good prognosis pattern indicates that the treatment is efficacious. In this embodiment, different timepoints are differentially labeled.

### 5.8.2.2.5 Hybridization to Microarrays

[0161] Nucleic acid hybridization and wash conditions are chosen so that the target polynucleotide molecules specifically bind or specifically hybridize to the complementary polynucleotide sequences of the array, preferably to a specific array site, wherein its complementary DNA is located.

[0162] Arrays containing double-stranded probe DNA situated thereon are preferably subjected to denaturing conditions to render the DNA single-stranded prior to contacting with the target polynucleotide molecules. Arrays containing single-stranded probe DNA (e.g., synthetic oligodeoxyribonucleic acids) may need to be denatured prior to contacting with the target polynucleotide molecules, e.g., to remove hairpins or dimers which form due to self complementary sequences.

[0163] Optimal hybridization conditions will depend on the length (e.g., oligomer versus polynucleotide greater than 200 bases) and type (e.g., RNA, or DNA) of probe and target nucleic acids. One of skill in the art will appreciate that as the oligonucleotides become shorter, it may become necessary to adjust their length to achieve a relatively uniform melting temperature for satisfactory hybridization results. General parameters for specific (i.e., stringent) hybridization conditions for nucleic acids are described in Sambrook et al., MOLECULAR CLONING: A LABORATORY MANUAL (2nd Ed.), Vols. 1-3, Cold Spring Harbor Laboratory, Cold Spring Harbor, N.Y. (1989), and in Ausubel et al., CURRENT PROTOCOLS IN MOLECULAR BIOLOGY, Vol. 2, Current Protocols Publishing, New York (1994). Typical hybridization conditions for the cDNA microarrays of Schena et al. are hybridization in 5×SSC plus 0.2% SDS at 65° C. for four hours, followed by washes at 25° C. in low stringency wash buffer (1×SSC plus 0.2% SDS), followed by 10 minutes at 25° C. in higher stringency wash buffer (0.1×SSC plus 0.2% SDS) (Schena et al., Proc. Natl. Acad. Sci. U.S.A. 93:10614 (1993)). Useful hybridization conditions are also provided in, e.g., Tijessen, 1993, HYBRIDIZATION WITH NUCLEIC ACID PROBES, Elsevier Science Publishers B.V.; and Kricka, 1992, NONISOTOPIC DNA PROBE TECHNIQUES, Academic Press, San Diego, Calif.

[0164] Particularly preferred hybridization conditions include hybridization at a temperature at or near the mean melting temperature of the probes (e.g., within 5° C., more preferably within 2° C.) in 1M NaCl, 50 mM MES buffer (pH 6.5), 0.5% sodium sarcosine and 30% formamide.

### 5.8.2.2.6 Signal Detection and Data Analysis

[0165] When fluorescently labeled probes are used, the fluorescence emissions at each site of a microarray may be, preferably, detected by scanning confocal laser microscopy. In one embodiment, a separate scan, using the appropriate excitation line, is carried out for each of the two fluorophores used. Alternatively, a laser may be used that allows simultaneous specimen illumination at wavelengths specific to the two fluorophores and emissions from the two fluorophores can be analyzed simultaneously (see Shalon et al., 1996, “A DNA microarray system for analyzing complex DNA samples using two-color fluorescent probe hybridization,” Genome Res. 6:639-645, which is incorporated by reference in its entirety for all purposes). In a preferred embodiment, the arrays are scanned with a laser fluorescent scanner with a computer controlled X-Y stage and a microscope objective. Sequential excitation of the two fluorophores is achieved with a multi-line, mixed gas laser and the emitted light is split by wavelength and detected with two photomultiplier tubes. Fluorescence laser scanning devices are described in Schena et al., Genome Res. 6:639-645 (1996), and in other references cited herein. Alternatively, the fiber-optic bundle described by Ferguson et al., Nature Biotech. 14:1681-1684 (1996), may be used to monitor mRNA abundance levels at a large number of sites simultaneously.

[0166] Signals are recorded and, in a preferred embodiment, analyzed by computer, e.g., using a 12 or 16 bit analog to digital board. In one embodiment the scanned image is despeckled using a graphics program (e.g., Hijaak Graphics Suite) and then analyzed using an image gridding program that creates a spreadsheet of the average hybridization at each wavelength at each site. If necessary, an experimentally determined correction for “cross talk” (or overlap) between the channels for the two fluors may be made. For any particular hybridization site on the transcript array, a ratio of the emission of the two fluorophores can be calculated. The ratio is independent of the absolute expression level of the cognate gene, but is useful for genes whose expression is significantly modulated in association with the different breast cancer-related condition.

### 5.9 Therapeutic Uses of DIAPH3 and DIAPH3

[0167] The invention also provides for treatment of breast cancer by administration of a therapeutic compound (termed herein “Therapeutic”). For example, to suppress breast cancer tumor growth or metastasis, a Therapeutic is administered that antagonizes (inhibits) the function of DIAPH3, or of the gene encoding it. Such “Therapeutics” include, but are not limited to, DIAPH3 antagonists, such as antibodies to DIAPH3 or small molecules that disrupt the binding of DIAPH3 to profilin or to a Rho GTPase; or antagonists of DIAPH3 expression, for example, antisense nucleic acids to a nucleic acid encoding DIAPH3. The above is described in detail in the subsections below.

### 5.9.1 DIAPH3 as a Target for Anti-Breast Cancer Drugs

[0168] As noted above, DIAPH3 is a formin homology domain protein that contains an FH2 domain. In mouse, an analogous protein, Dia, has been shown to interact with GTPase Rho, a protein that in some cells stimulates the production of stress fibers, which are fibers of actin and myosin that can contract when a cell releases from the substratum. See Ridley, Nature Cell Biol. 1:E64-E67 (1999). When Rho GTPase binds GTP, Rho GTPase interacts with Dia and another protein, ROCK, which is clearly implicated in cytoskeletal rearrangements. See Alberts et al., J. Biol. Chem. 273(15):8616-8622. Dia mediates the formation of stress fibers by recruiting profilin-bound actin to sites where Rho GTPase is active. See Ridley, above. Based on the activities of the related murine Dia protein, DIAPH3 is expected to be a link between one or more human Rho-GTPases and the formation of actin fibers associated with cytoskeletal rearrangements. As such, DIAPH3 is a desirable target for drugs designed to interrupt intracellular signals that direct such rearrangements and detachment from the substratum, leading to metastasis, i.e., anti-cancer drugs.

[0169] The invention therefore provides binding agents specific to DIAPH3 and analogs and derivatives thereof, including, without limitation, substrates, agonists, antagonists, and natural intracellular binding targets. For example, novel polypeptide-specific binding agents include DIAPH3 polypeptide-specific receptors, such as somatically recombined polypeptide receptors like specific antibodies or T-cell antigen receptors (see, e.g Harlow and Lane (1988) ANTIBODIES, A LABORATORY MANUAL, Cold Spring Harbor Laboratory) and other natural intracellular binding agents identified with assays such as one-, two- and three-hybrid screens, non-natural intracellular binding agents identified in screens of chemical libraries, etc.

[0170] These binding agents may be labeled with fluorescent, radioactive, chemiluminescent, or other easily detectable molecules, either conjugated directly to the binding agent or conjugated to a probe specific for the binding agent. Agents of particular interest modulate DIAPH3 function, e.g., DIAPH3-dependent actin fiber formation; interaction with Rho GTPase or interaction with profilin.

[0171] Agents that modulate the interactions of a DIAPH3 with its ligands/natural binding targets can be used to modulate biological processes associated with DIAPH3 function, e.g., by contacting a cell comprising a human diaphanous polypeptide (e.g., administering to a subject comprising such a cell) with such an agent. Biological processes mediated by human diaphanous polypeptides include cellular events that are mediated when DIAPH3 binds a ligand, e.g., cytoskeletal modifications.

[0172] Such agents that modulate or inhibit the interaction of DIAPH3 with other cellular components, particularly cellular components involved in DIAPH3-mediated signaling pathways that lead to cytoskeletal rearrangements, are useful as Therapeutics. In particular, such Therapeutics are useful as treatments for cancer and cancer-related conditions, in particular, the treatment of breast cancer.

[0173] Methods of assaying for such agents are described in section 5.10, infra.

### 5.9.2 Antisense Regulation of Expression of DIAPH3

[0174] The function of the DIAPH3 gene may be inhibited by the use of antisense nucleic acids substantially complementary to the transcript from DIAPH3. The present invention provides the therapeutic or prophylactic use of nucleic acids of at least six nucleotides that are antisense to a gene or cDNA encoding DIAPH3 or a portion thereof. A “DIAPH3 antisense nucleic acid” as used herein refers to a nucleic acid that of hybridizes to a sequence-specific nucleic acid (preferably mRNA) segment (i.e., not the poly-A tract of an mRNA) that encodes DIAPH3, or a portion thereof, by virtue of some sequence complementarity. The antisense nucleic acid may be complementary to a coding and/or noncoding region of an mRNA encoding DIAPH3. Such antisense nucleic acids have utility as Therapeutics that inhibits DIAPH3, and can be used in the treatment of disorders that result from DIAPH3 overexpression.

[0175] The antisense nucleic acids of the invention can be oligonucleotides that are double-stranded or single-stranded, RNA or DNA or a modification or derivative thereof, which can be directly administered to a cell, or which can be produced intracellularly by transcription of exogenous, introduced sequences.

[0176] The invention further provides pharmaceutical compositions comprising an effective amount of the DIAPH3 antisense nucleic acids of the invention in a pharmaceutically acceptable carrier, as described infra. In another embodiment, the invention is directed to methods for inhibiting the expression of a DIAPH3-encoding nucleic acid sequence in a prokaryotic or eukaryotic cell comprising providing the cell with an effective amount of a composition comprising a DIAPH3 antisense nucleic acid of the invention.

[0177] DIAPH3 antisense nucleic acids and their uses are described in detail below.

### 5.9.2.1 DIAPH3 Antisense Nucleic Acids

[0178] The DIAPH3 antisense nucleic acids of the present invention are of at least six nucleotides and are preferably longer, typically ranging from 6 to about 50 nucleotides. In specific aspects, the oligonucleotide is at least 10 nucleotides, at least 15 nucleotides, at least 100 nucleotides, or at least 200 nucleotides. The oligonucleotides can be DNA or RNA or chimeric mixtures or derivatives or modified versions thereof, and can be single-stranded or double-stranded. The oligonucleotide can be modified at the base moiety, sugar moiety, or phosphate backbone. The oligonucleotide may include other appending groups such as peptides, or agents facilitating transport across the cell membrane (see, e.g., Letsinger et al., Proc. Natl. Acad. Sci. U.S.A. 86:6553-6556 (1989); Lemaitre et al., Proc. Natl. Acad. Sci. U.S.A. 84:648-652 (1987); U.S. Pat. No. 4,904,582) or blood-brain barrier (see, e.g., PCT Publication No. WO 89/10134, published Apr. 25, 1988), hybridization-triggered cleavage agents (see, e.g., Krol et al., BioTechniques 6:958-976 (1988)) or intercalating agents (see, e.g., Zon, Pharm. Res. 5:539-549 (1988)). In a preferred aspect of the invention, a DIAPH3 antisense oligonucleotide is provided, preferably of single-stranded DNA. In a most preferred aspect, such an oligonucleotide comprises a sequence antisense to the sequence encoding one or more domains of a DIAPH3 protein, most preferably, of a human DIAPH3 protein. The oligonucleotide may be modified at any position on its structure with substituents generally known in the art.

[0179] The DIAPH3 antisense oligonucleotide may comprise at least one modified base moiety which is selected from the group including but not limited to 5-fluorouracil, 5-bromouracil, 5-chlorouracil, 5-iodouracil, hypoxanthine, xantine, 4-acetylcytosine, 5-(carboxyhydroxylmethyl) uracil, 5-carboxymethylaminomethyl-2-thiouridine, 5-carboxymethylaminomethyluracil, dihydrouracil, beta-D-galactosylqueosine, inosine, N6-isopentenyladenine, 1-methylguanine, 1-methylinosine, 2,2-dimethylguanine, 2-methyladenine, 2-methylguanine, 3-methylcytosine, 5-methylcytosine, N6-adenine, 7-methylguanine, 5-methylaminomethyluracil, 5-methoxyaminomethyl-2-thiouracil, 5 beta-D-mannosylqueosine, 5′-methoxycarboxymethyluracil, 5-methoxyuracil, 2-methylthio-N6-isopentenyladenine, uracil-5-oxyacetic acid (v), wybutoxosine, pseudouracil, queosine, 2-thiocytosine, 5-methyl-2-thiouracil, 2-thiouracil, 4-thiouracil, 5-methyluracil, uracil-5-oxyacetic acid methylester, uracil-5-oxyacetic acid (v), 5-methyl-2-thiouracil, 3-(3-amino-3-N-2-carboxypropyl) uracil, (acp3)w, and 2,6-diaminopurine.

[0180] In another embodiment, the oligonucleotide comprises at least one modified sugar moiety selected from the group including but not limited to arabinose, 2-fluoroarabinose, xylulose, and hexose.

[0181] In yet another embodiment, the oligonucleotide comprises at least one modified phosphate backbone selected from the group consisting of a phosphorothioate, a phosphorodithioate, a phosphoramidothioate, a phosphoramidate, a thiophosphoamidate, a phosphordiamidate, a methylphosphonate, an alkyl phosphotriester, and a formacetal or analog thereof.

[0182] In yet another embodiment, the oligonucleotide is an α-anomeric oligonucleotide. An α-anomeric oligonucleotide forms specific double-stranded hybrids with complementary RNA in which, contrary to the usual β-units, the strands run parallel to each other (Gautier et al., Nucl. Acids Res. 15:6625-6641 (1987)).

[0183] The oligonucleotide may be conjugated to another molecule, e.g., a peptide, hybridization triggered cross-linking agent, transport agent, hybridization-triggered cleavage agent, etc.

[0184] Oligonucleotides of the invention may be synthesized by standard methods known in the art, e.g. by use of an automated DNA synthesizer (such as are commercially available from Biosearch, Applied Biosystems, etc.). As examples, phosphorothioate oligonucleotides may be synthesized by the method of Stein et al. Nucl. Acids Res. 16:3209 (1988), methylphosphonate oligonucleotides can be prepared by use of controlled pore glass polymer supports (Sarin et al., Proc. Natl. Acad. Sci. U.S.A. 85:7448-7451 (1988)), etc. In a specific embodiment, the DIAPH3 antisense oligonucleotide comprises catalytic RNA, or a ribozyme (see, e.g., PCT International Publication WO 90/11364, published Oct. 4, 1990; Sarver et al., Science 247:1222-1225 (1990)). In another embodiment, the oligonucleotide is a 2′-O-methylribonucleotide (Inoue et al., Nucl. Acids Res. 15:6131-6148 (1987)), or a chimeric RNA-DNA analog (Inoue et al., FEBS Lett. 215: 327-330 (1987)).

[0185] In an alternative embodiment, the DIAPH3 antisense nucleic acid of the invention is produced intracellularly by transcription from an exogenous sequence. For example, a vector can be introduced in vivo such that it is taken up by a cell, within which cell the vector or a portion thereof transcribed, producing an antisense nucleic acid (RNA) of the invention. Such a vector would contain a sequence encoding the DIAPH3 antisense nucleic acid. Such a vector can remain episomal or become chromosomally integrated, as long as it can be transcribed to produce the desired antisense RNA. Such vectors can be constructed by recombinant DNA technology methods standard in the art. Vectors can be plasmid, viral, or others known in the art, used for replication and expression in mammalian cells. Expression of the sequence encoding the DIAPH3 antisense RNA can be by any promoter known in the art to act in mammalian, preferably human, cells. Such promoters can be inducible or constitutive. Such promoters include but are not limited to: the SV40 early promoter region (Bernoist and Chambon, Nature 290:304-310 (1981)), the promoter contained in the 3′ long terminal repeat of Rous sarcoma virus (Yamamoto et al., Cell 22:787-797 (1980)), the herpes thymidine kinase promoter (Wagner et al., Proc. Natl. Acad. Sci. U.S.A. 78:1441-1445 (1981)), the regulatory sequences of the metallothionein gene (Brinster et al., Nature 296:39-42 (1982)), etc.

[0186] The antisense nucleic acids of the invention comprise a sequence complementary to at least a portion of an RNA transcript of DIAPH3 or a homolog or derivative thereof. However, absolute complementarity, although preferred, is not required. A sequence “complementary to at least a portion of an RNA,” as referred to herein, means a sequence having sufficient complementarity to be able to hybridize with the RNA, forming a stable duplex; in the case of double-stranded DIAPH3 antisense nucleic acids, a single strand of the duplex DNA may thus be tested, or triplex formation may be assayed. The ability to hybridize will depend on both the degree of complementarity and the length of the antisense nucleic acid. Generally, the longer the hybridizing nucleic acid, the more base mismatches with an RNA transcribed from a DIAPH3-encoding gene it may contain and still form a stable duplex (or triplex, as the case may be). One skilled in the art can ascertain a tolerable degree of mismatch by use of standard procedures to determine the melting point of the hybridized complex. The antisense nucleic acids of the present invention hybridize to the target nucleic acid under moderately stringent conditions, and more preferably hybridize under highly stringent conditions.

### 5.9.2.2 Therapeutic Use of Antisense Nucleic Acids to DIAPH3

[0187] Antisense nucleic acids to the DIAPH3-encoding genes and nucleic acid sequences of the present invention can be used to treat disorders of a cell type that expresses, or preferably overexpresses, DIAPH3. In a specific embodiment, such a disorder is a cancer. In a more specific embodiment, the condition is breast cancer. In a preferred embodiment, a single-stranded DNA antisense DIAPH3 oligonucleotide is used. Cell types which express or overexpress DIAPH3 RNA can be identified by various methods known in the art. Such methods include but are not limited to hybridization with a DIAPH3-specific nucleic acid (e.g. by Northern hybridization, dot blot hybridization, in situ hybridization), observing the ability of RNA from the cell type to be translated in vitro into DIAPH3, immunoassay, etc. In a preferred aspect, primary tissue from a patient can be assayed for expression of DIAPH3 prior to treatment, e.g., by immunocytochemistry or in situ hybridization.

[0188] Pharmaceutical compositions of the invention (see Section [5.9.4), comprising an effective amount of a DIAPH3 antisense nucleic acid in a pharmaceutically acceptable carrier, can be administered to a patient having a disease or disorder which is of a type that expresses or overexpresses DIAPH3 or DIAPH3 RNA.

[0189] The amount of DIAPH3 antisense nucleic acid which will be effective in the treatment of a particular disorder or condition will depend on the nature of the disorder or condition, and can be determined by standard clinical techniques. Where possible, it is desirable to determine the antisense cytotoxicity of the tumor type to be treated in vitro, and then in useful animal model systems prior to testing and use in humans.

[0190] In a specific embodiment, pharmaceutical compositions comprising DIAPH3 antisense nucleic acids are administered via liposomes, microparticles, or microcapsules. In various embodiments of the invention, it may be useful to use such compositions to achieve sustained release of the DIAPH3 antisense nucleic acids. In a specific embodiment, it may be desirable to utilize liposomes targeted via antibodies to specific identifiable tumor antigens (Leonetti et al., 1990, Proc. Natl. Acad. Sci. U.S.A. 87:2448-2451 (1990); Renneisen et al., J. Biol. Chem. 265:16337-16342 (1990)).

### 5.9.3 Other Means of Regulating the Abundance of DIAPH3 RNA

[0191] Post-transcriptional gene silencing (PTGS) or RNA interference (RNAi) can also be used to modify RNA abundances, for example, DIAPH3 RNA abundance (Guo et al., 1995, Cell 81:611-620; Fire et al., 1998, Nature 391:806-811). In RNAi, double-stranded RNAs (dsRNAs) known as small interfering RNAs (siRNAs) are injected or transfected into cells to specifically block expression of a homologous gene. In RNAi, both the sense strand and the anti-sense strand can inactivate the corresponding gene. The dsRNAs may be cut by nuclease into 21-23 nucleotide fragments. These fragments may be hybridized to the homologous region of their corresponding mRNAs to form double-stranded segments that are degraded by nuclease (Grant, 1999, Cell 96:303-306; Tabara et al., 1999, Cell 99:123-132; Zamore et al., 2000, Cell 101:25-33; Bass, 2000, Cell 101:235-238; Petcherski et al., 2000, Nature 405:364-368; Elbashir et al., 2001, Nature 411:494-498; Paddison et al., Proc. Natl. Acad. Sci. USA 99:1443-1448). In a preferred embodiment, the siRNA is perfectly complementary to the target mRNA. Therefore, in one embodiment, one or more dsRNAs having sequences homologous to a sequence of human DIAPH3, wherein the abundance of DIAPH3 RNA is to be modified, is transfected into a cell or tissue sample. Any standard method for introducing nucleic acids into cells can be used. In specific embodiments, the interfering RNAs that can be used to modulate the expression of DIAPH3, or a nucleotide sequence encoding DIAPH3, are DIAPH3-1555 and DIAPH3-1805 (see Example 2). Thus, in one embodiment, the invention provides a method of inhibiting the expression of a nucleotide sequence encoding SEQ ID NO: 3 comprising contacting an RNA encoding SEQ ID NO: 3 with an interfering RNA, said interfering RNA comprising a nucleotide sequence complementary and hybridizable to SEQ ID NO: 1, under conditions that allow said interfering RNA and said mRNA to hybridize. In a specific embodiment, the nucleotide sequence of said interfering RNA, or a complement thereof, is present within SEQ ID NO: 1. In another specific embodiment, the nucleotide sequence of said interfering RNA is selected from the group consisting of SEQ ID NO: 274 and SEQ ID NO: 275.

[0192] Methods of modifying protein abundances include, inter alia, those altering protein degradation rates and those using antibodies (which bind to proteins affecting abundances of activities of native target protein species). Increasing (or decreasing) the degradation rates of a protein species decreases (or increases) the abundance of that species. Methods for controllably increasing the degradation rate of a target protein in response to elevated temperature and/or exposure to a particular drug, which are known in the art, can be employed in this invention. For example, one such method employs a heat-inducible or drug-inducible N-terminal degron, which is an N-terminal protein fragment that exposes a degradation signal promoting rapid protein degradation at a higher temperature (e.g., 37° C.) and which is hidden to prevent rapid degradation at a lower temperature (e.g., 23° C.) (Dohmen et. al, 1994, Science 263:1273-1276). Such an exemplary degron is Arg-DHFRts, a variant of murine dihydrofolate reductase in which the N-terminal Val is replaced by Arg and the Pro at position 66 is replaced with Leu. According to this method, for example, a gene for a target protein, P, is replaced by standard gene targeting methods known in the art (Lodish et al., 1995, Molecular Biology of the Cell, W.H. Freeman and Co., New York, especially chap 8) with a gene coding for the fusion protein Ub-Arg-DHFRts-P (“Ub” stands for ubiquitin). The N-terminal ubiquitin is rapidly cleaved after translation exposing the N-terminal degron. At lower temperatures, lysines internal to Arg-DHFRts are not exposed, ubiquitination of the fusion protein does not occur, degradation is slow, and active target protein levels are high. At higher temperatures (in the absence of methotrexate), lysines internal to Arg-DHFRts are exposed, ubiquitination of the fusion protein occurs, degradation is rapid, and active target protein levels are low. Heat activation of degradation is controllably blocked by exposure methotrexate. This method is adaptable to other N-terminal degrees which are responsive to other inducing factors, such as drugs and temperature changes.

### 5.9.4 Demonstration of Therapeutic or Prophylactic Utility

[0193] The Therapeutics of the invention are preferably tested in vitro, and then in vivo for the desired therapeutic or prophylactic activity, prior to use in humans. For example, in vitro assays which can be used to determine whether administration of a specific Therapeutic is indicated, include in vitro cell culture assays in which a patient tissue sample is grown in culture, and exposed to or otherwise administered a Therapeutic, and the effect of such Therapeutic upon the tissue sample is observed. In one embodiment, a Therapeutic that reverses or reduces formation of actin fibers, such as stress fibers, in, for example, fibroblasts, is selected for therapeutic use in vivo. Assays standard in the art can be used to assess such changes in fiber formation, for example by antibody staining of actin fibers in cells grown in vitro, microscopic examination of the cells to detect changes in morphology, etc.

[0194] In various specific embodiments, in vitro assays can be carried out with a patient's breast cancer tumor cells, to determine if a Therapeutic has a desired effect upon such cells.

[0195] In another embodiment, breast cancer tumor cells are plated out or grown in vitro, and exposed to a Therapeutic. The Therapeutic that results in a cell phenotype that is more normal (i.e., less representative of a pre-neoplastic state, neoplastic state, malignant state, or transformed phenotype) is selected for therapeutic use. Many assays standard in the art can be used to assess whether a pre-neoplastic state, neoplastic state, or a transformed or malignant phenotype, is present. For example, characteristics associated with a transformed phenotype (a set of in vitro characteristics associated with a tumorigenic ability in vivo) include a more rounded cell morphology, loose substratum attachment relative to normal cells, loss of contact inhibition, loss of anchorage dependence, release of proteases such as plasminogen activator, increased sugar transport, decreased serum requirement, expression of fetal antigens, disappearance of the 250,000 dalton surface protein, etc. (see Luria et al., GENERAL VIROLOGY, 3d ed., John Wiley & Sons, New York pp. 436-446 (1978)).

[0196] In other specific embodiments, the in vitro assays described supra can be carried out using a cell line, in particular, a breast cancer cell line, rather than a cell sample derived from the specific patient to be treated.

[0197] Compounds for use in therapy can be tested in suitable animal model systems prior to testing in humans, including but not limited to rats, mice, chicken, cows, monkeys, rabbits, etc. For in vivo testing, prior to administration to humans, any animal model system known in the art may be used.

### 5.9.4 Therapeutic/Prophylactic Administration and Compositions

[0198] The invention provides methods of treatment (and prophylaxis) by administration to a subject of an effective amount of a Therapeutic of the invention. In a preferred aspect, the Therapeutic is substantially purified. The subject is preferably an animal, including but not limited to animals such as cows, pigs, horses, chickens, cats, dogs, etc., and is preferably a mammal, and most preferably human. In a specific embodiment, a non-human mammal is the subject. Formulations and methods of administration that can be employed can be selected from among those described herein below.

[0199] Various delivery systems are known and can be used to administer a Therapeutic of the invention, e.g., encapsulation in liposomes, microparticles, microcapsules, recombinant cells capable of expressing the Therapeutic, receptor-mediated endocytosis (see, e.g., Wu and Wu, J. Biol. Chem. 262:4429-4432 (1987)), construction of a Therapeutic nucleic acid as part of a retroviral or other vector, etc. Methods of introduction include but are not limited to intradermal, intramuscular, intraperitoneal, intravenous, subcutaneous, intranasal, epidural, and oral routes. The compounds may be administered by any convenient route, for example by infusion or bolus injection, by absorption through epithelial or mucocutaneous linings (e.g., oral mucosa, rectal and intestinal mucosa, etc.) and may be administered together with other biologically active agents. Administration can be systemic or local. In addition, it may be desirable to introduce the pharmaceutical compositions of the invention into the central nervous system by any suitable route, including intraventricular and intrathecal injection; intraventricular injection may be facilitated by an intraventricular catheter, for example, attached to a reservoir, such as an Ommaya reservoir. Pulmonary administration can also be employed, e.g., by use of an inhaler or nebulizer, and formulation with an aerosolizing agent.

[0200] In a specific embodiment, it may be desirable to administer the pharmaceutical compositions of the invention locally to the area in need of treatment; this may be achieved by, for example, and not by way of limitation, local infusion during surgery, topical application, e.g., in conjunction with a wound dressing after surgery, by injection, by means of a catheter, by means of a suppository, or by means of an implant, said implant being of a porous, non-porous, or gelatinous material, including membranes, such as sialastic membranes, or fibers. In one embodiment, administration can be by direct injection at the site (or former site) of a malignant tumor or neoplastic or pre-neoplastic tissue.

[0201] In another embodiment, the Therapeutic can be delivered in a vesicle, in particular a liposome (see Langer, Science 249:1527-1533 (1990); Treat et al., in LIPOSOMES IN THE THERAPY OF INFECTIOUS DISEASE AND CANCER, Lopez-Berestein and Fidler (eds.), Liss, N.Y., pp. 317-372, 353-365 (1989))

[0202] In yet another embodiment, the Therapeutic can be delivered in a controlled release system. In one embodiment, a pump may be used (see Langer, supra; Sefton, CRC Crit. Ref. Biomed. Eng. 14:201 (1987); Buchwald et al., Surgery 88:507 (1980); Saudek et al., N. Engl. J. Med. 321:574 (1989)). In another embodiment, polymeric materials can be used (see MEDICAL APPLICATIONS OF CONTROLLED RELEASE, Langer and Wise (eds.), CRC Pres., Boca Raton, Fla. (1974); CONTROLLED DRUG BIOAVAILABILITY: DRUG PRODUCT DESIGN AND PERFORMANCE, Smolen and Ball (eds.), Wiley, N.Y. (1984); Ranger and Pewas, J. Macromol. Sci. Rev. Macromol. Chem. 23:61 (1983); see also Levy et al., Science 228:190 (1985); During et al., Ann. Neurol. 25:351 (1989); Howard et al., J. Neurosurg. 71:105 (1989)). In yet another embodiment, a controlled release system can be placed in proximity of the therapeutic target, i.e., the thymus, thus requiring only a fraction of the systemic dose (see, e.g., Goodson, in MEDICAL APPLICATIONS OF CONTROLLED RELEASE, supra, vol. 2, pp. 115-138 (1984)). Other controlled release systems are discussed in the review by Langer (Science 249:1527-1533 (1990)).

[0203] In a specific embodiment where the Therapeutic is a nucleic acid encoding a protein Therapeutic, the nucleic acid can be administered in vivo to promote expression of its encoded protein, by constructing it as part of an appropriate nucleic acid expression vector and administering it so that it becomes intracellular, e.g., by use of a retroviral vector (see U.S. Pat. No. 4,980,286), or by direct injection, or by use of microparticle bombardment (e.g., a gene gun; Biolistic, DuPont), or coating with lipids or cell-surface receptors or transfecting agents, or by administering it in linkage to a homeobox-like peptide which is known to enter the nucleus (see e.g., Joliot et al., Proc. Natl. Acad. Sci. U.S.A. 88:1864-1868 (1991)), etc. Alternatively, a nucleic acid Therapeutic can be introduced intracellularly and incorporated within host cell DNA for expression, by homologous recombination.

[0204] The present invention also provides pharmaceutical compositions. Such compositions comprise a therapeutically effective amount of a Therapeutic, and a pharmaceutically acceptable carrier. In a specific embodiment, the term “pharmaceutically acceptable” means approved by a regulatory agency of the Federal or a state government or listed in the U.S. Pharmacopeia or other generally recognized pharmacopeia for use in animals, and more particularly in humans. The term “carrier” refers to a diluent, adjuvant, excipient, or vehicle with which the therapeutic is administered. Such pharmaceutical carriers can be sterile liquids, such as water and oils, including those of petroleum, animal, vegetable or synthetic origin, such as peanut oil, soybean oil, mineral oil, sesame oil and the like. Water is a preferred carrier when the pharmaceutical composition is administered intravenously. Saline solutions and aqueous dextrose and glycerol solutions can also be employed as liquid carriers, particularly for injectable solutions. Suitable pharmaceutical excipients include starch, glucose, lactose, sucrose, gelatin, malt, rice, flour, chalk, silica gel, sodium stearate, glycerol monostearate, talc, sodium chloride, dried skim milk, glycerol, propylene, glycol, water, ethanol and the like. The composition, if desired, can also contain minor amounts of wetting or emulsifying agents, or pH buffering agents. These compositions can take the form of solutions, suspensions, emulsion, tablets, pills, capsules, powders, sustained-release formulations and the like. The composition can be formulated as a suppository, with traditional binders and carriers such as triglycerides. Oral formulation can include standard carriers such as pharmaceutical grades of mannitol, lactose, starch, magnesium stearate, sodium saccharine, cellulose, magnesium carbonate, etc. Examples of suitable pharmaceutical carriers are described in REMINGTON'S PHARMACEUTICAL SCIENCES by E. W. Martin. Such compositions will contain a therapeutically effective amount of the Therapeutic, preferably in purified form, together with a suitable amount of carrier so as to provide the form for proper administration to the patient. The formulation should suit the mode of administration.

[0205] In a preferred embodiment, the composition is formulated in accordance with routine procedures as a pharmaceutical composition adapted for intravenous administration to human beings. Typically, compositions for intravenous administration are solutions in sterile isotonic aqueous buffer. Where necessary, the composition may also include a solubilizing agent and a local anesthetic such as lignocaine to ease pain at the site of the injection. Generally, the ingredients are supplied either separately or mixed together in unit dosage form, for example, as a dry lyophilized powder or water free concentrate in a hermetically sealed container such as an ampoule or sachette indicating the quantity of active agent. Where the composition is to be administered by infusion, it can be dispensed with an infusion bottle containing sterile pharmaceutical grade water or saline. Where the composition is administered by injection, an ampoule of sterile water for injection or saline can be provided so that the ingredients may be mixed prior to administration.

[0206] The Therapeutics of the invention can be formulated as neutral or salt forms. Pharmaceutically acceptable salts include those formed with free amino groups such as those derived from hydrochloric, phosphoric, acetic, oxalic, tartaric acids, etc., and those formed with free carboxyl groups such as those derived from sodium, potassium, ammonium, calcium, ferric hydroxides, isopropylamine, triethylamine, 2-ethylamino ethanol, histidine, procaine, etc.

[0207] The amount of the Therapeutic of the invention which will be effective in the treatment of a particular disorder or condition will depend on the nature of the disorder or condition, and can be determined by standard clinical techniques. In addition, in vitro assays may optionally be employed to help identify optimal dosage ranges. The precise dose to be employed in the formulation will also depend on the route of administration, and the seriousness of the disease or disorder, and should be decided according to the judgment of the practitioner and each patient's circumstances. However, suitable dosage ranges for intravenous administration are generally about 20-500 micrograms of active compound per kilogram body weight. Suitable dosage ranges for intranasal administration are generally about 0.01 pg/kg body weight to 1 mg/kg body weight. Effective doses may be extrapolated from dose-response curves derived from in vitro or animal model test systems. Suppositories generally contain active ingredient in the range of 0.5% to 10% by weight; oral formulations preferably contain 10% to 95% active ingredient.

[0208] The invention also provides a pharmaceutical pack or kit comprising one or more containers filled with one or more of the ingredients of the pharmaceutical compositions of the invention. In one embodiment, the kit provides a container having a therapeutically-active amount of a Therapeutic. Optionally associated with such container(s) can be a notice in the form prescribed by a governmental agency regulating the manufacture, use or sale of pharmaceuticals or biological products, which notice reflects approval by the agency of manufacture, use or sale for human administration.

### 5.10 Screening for DIAPH3 Agonists and Antagonists

[0209] DIAPH3 nucleic acids, proteins, and derivatives also have uses in screening assays to detect molecules that specifically bind to DIAPH3 nucleic acids, DIAPH3, or derivatives or analogs thereof and thus have potential use as agonists or antagonists of DIAPH3, in particular, molecules that affect breast cell proliferation, division, detachment from a substrate, etc. In a preferred embodiment, such assays are performed to screen for molecules with potential utility as anti-cancer drugs or lead compounds for drug development. The invention thus provides assays to detect molecules that specifically bind to DIAPH3 nucleic acids, DIAPH3, or derivatives thereof. For example, recombinant cells expressing DIAPH3 nucleic acids can be used to recombinantly produce DIAPH3 in these assays, to screen for molecules that bind to DIAPH3. Molecules (e.g., putative binding partners of DIAPH3) are contacted with DIAPH3 or fragment thereof under conditions conducive to binding, and then molecules that specifically bind to DIAPH3 are identified. Similar methods can be used to screen for molecules that bind to DIAPH3 derivatives or DIAPH3 nucleic acids. Methods that can be used to carry out the foregoing are commonly known in the art.

[0210] Thus, in one embodiment, the invention provides method of identifying a molecule that specifically binds to a ligand, comprising contacting a ligand with one or more candidate binding molecules under conditions conducive to binding between said ligand and said molecules, wherein said ligand is selected from the group consisting of a first protein comprising SEQ ID NO: 3, a second protein comprising a fragment of SEQ ID NO: 3 comprising the FH2 domain of DIAPH3 but less than all of SEQ ID NO: 3, and a nucleic acid encoding said first protein or said second protein, comprising (a) contacting said ligand with a plurality of molecules under conditions conducive to binding between said ligand and the molecules; and (b) identifying a molecule within said plurality that specifically binds to said ligand. In various embodiments, said molecule is a protein, for example, an antibody; a nucleic acid; or a small molecule. As used herein, the term “small molecule” includes, but is not limited to, organic or inorganic compounds (i.e., including heteroorganic and organometallic compounds) having a molecular weight less than 10,000 grams per mole, organic or inorganic compounds having a molecular weight less than 5,000 grams per mole, organic or inorganic compounds having a molecular weight less than 1,000 grams per mole, organic or inorganic compounds having a molecular weight less than 500 grams per mole, organic or inorganic compounds having a molecular weight less than 100 grams per mole, and salts, esters, and other pharmaceutically acceptable forms of such compounds. Salts, esters, and other pharmaceutically acceptable forms of such compounds are also encompassed. In a specific embodiment of this method, any of the protein, the candidate binding molecule or the ligand are be purified. The invention also provides a method of identifying an agent that modulates the binding of a protein comprising SEQ ID NO: 3 to a binding partner, comprising contacting said protein and said binding partner with an agent; and measuring an amount of a complex comprising said protein and said binding partner in the presence of said agent, wherein if said amount differs from said amount in the absence of said agent, said agent is identified as an agent that modulates the binding of said protein to said binding partner. In a more specific embodiment, any of the protein comprising SEQ ID NO: 3, the ligand, or the agent are purified.

[0211] By way of example, diversity libraries, such as random or combinatorial peptide or nonpeptide libraries can be screened for molecules that specifically bind to DIAPH3. Many libraries are known in the art that can be used, e.g., chemically synthesized libraries, recombinant (e.g., phage display libraries), and in vitro translation-based libraries. Examples of chemically synthesized libraries are described in Fodor et al., Science 251:767-773 (1991); Houghten et al., Nature 354:84-86 (1991); Lam et al., Nature 354:82-84 (1991); Medynski, Bio/Technology 12:709-710 (1994); Gallop et al., J. Medicinal Chemistry 37(9):1233-1251 (1994); Ohlmeyer et al., Proc. Natl. Acad. Sci. U.S.A. 90:10922-10926 (1993); Erb et al., Proc. Natl. Acad. Sci. U.S.A. 91:11422-11426 (1994); Houghten et al., Biotechniques 13:412 (1992); Jayawickreme et al., Proc. Natl. Acad. Sci. U.S.A. 91:1614-1618 (1994); Salmon et al., Proc. Natl. Acad. Sci. U.S.A. 90:11708-11712 (1993); PCT Publication No. WO 93/20242; and Brenner and Lerner, Proc. Natl. Acad. Sci. U.S.A. 89:5381-5383 (1992).

[0212] Examples of phage display libraries are described in Scott and Smith, Science 249:386-390 (1990); Devlin et al., Science, 249:404-406 (1990); Christian, R. B., et al., J. Mol. Biol. 227:711-718 (1992)); Lenstra, J. Immunol. Meth. 152:149-157 (1992); Kay et al., Gene 128:59-65 (1993); and PCT Publication No. WO 94/18318 published Aug. 18, 1994. In vitro translation-based libraries include but are not limited to those described in PCT Publication No. WO 91/05058 published Apr. 18, 1991; and Mattheakis et al., Proc. Natl. Acad. Sci. U.S.A. 91:9022-9026 (1994).

[0213] By way of examples of nonpeptide libraries, a benzodiazepine library (see e.g., Bunin et al., Proc. Natl. Acad. Sci. U.S.A. 91:4708-4712 (1994)) can be adapted for use. Peptoid libraries (Simon et al., Proc. Natl. Acad. Sci. U.S.A. 89:9367-9371 (1992)) can also be used. Another example of a library that can be used, in which the amide functionalities in peptides have been permethylated to generate a chemically transformed combinatorial library, is described by Ostresh et al., Proc. Natl. Acad. Sci. U.S.A. 91:11138-11142 (1994).

[0214] Screening the libraries can be accomplished by any of a variety of commonly known methods. See, e.g., the following references, which disclose screening of peptide libraries: Parmley and Smith, Adv. Exp. Med. Biol. 251:215-218 (1989); Scott and Smith, Science 249:386-390 (1990); Fowlkes et al., Bio/Techniques 13:422-427 (1992); Oldenburg et al., Proc. Natl. Acad. Sci. U.S.A. 89:5393-5397 (1992); Yu et al., Cell 76:933-945 (1994); Staudt et al., Science 241:577-580 (1988); Bock et al., Nature 355:564-566 (1992); Tuerk et al., Proc. Natl. Acad. Sci. U.S.A. 89:6988-6992 (1992); Ellington et al., Nature 355.850-852 (1992); U.S. Pat. No. 5,096,815, U.S. Pat. No. 5,223,409, and U.S. Pat. No. 5,198,346, all to Ladner et al.; Rebar and Pabo, Science 263:671-673 (1993); and PCT Publication No. WO 94/18318, published Aug. 8, 1994.

[0215] In a specific embodiment, screening can be carried out by contacting the library members with DIAPH3 (or nucleic acid or analog or derivative thereof) immobilized on a solid phase and harvesting those library members that bind to the protein (or nucleic acid or derivative). Examples of such screening methods, termed “panning” techniques are described by way of example in Parmley and Smith, Gene 73:305-318 (1988); Fowlkes et al., Bio/Techniques 13:422-427 (1992); PCT Publication No. WO 94/18318; and in references cited herein above.

[0216] In another embodiment, the two-hybrid system for selecting interacting proteins in yeast (Fields and Song, Nature 340:245-246 (1989); Chien et al., Proc. Natl. Acad. Sci. U.S.A. 88:9578-9582 (1991)) can be used to identify molecules that specifically bind to DIAPH3 or a derivative or analog thereof.

[0217] In another embodiment, screening can be carried out by creating a peptide library in a prokaryotic or eukaryotic cells, such that the library proteins are expressed on the cells' surface, followed by contacting the cell surface with DIAPH3 and determining whether binding has taken place. Alternatively, the cells are transformed with a nucleic acid encoding DIAPH3, such that DIAPH3 is expressed on the cells' surface. The cells are then contacted with a potential agonist or antagonist, and binding, or lack thereof, is determined. In a specific embodiment of the foregoing, the potential agonist or antagonist is expressed in the same or a different cell such that the potential agonist or antagonist is expressed on the cells' surface.

### 5.11 Transgenic Animals

[0218] The invention also provides animal models. Transgenic animals that have incorporated and express a constitutively-functional DIAPH3 gene, DIAPH3 cDNA, or homolog or derivative thereof, have use as animal models of cancer and/or tumorigenesis. Such animals can be used to screen for or test molecules for the ability to suppress tumorigenesis or breast or other cancer cell proliferation, and thus the ability to treat, ameliorate or prevent such diseases and disorders. In one embodiment, animal models of breast cancer are provided.

[0219] In particular, each transgenic line expressing a particular key gene under the control of the regulatory sequences of a characterizing gene is created by the introduction, for example by pronuclear injection, of a vector containing the transgene into a founder animal, such that the transgene is transmitted to offspring in the line. The transgene preferably randomly integrates into the genome of the founder but in specific embodiments may be introduced by directed homologous recombination. In a preferred embodiment, the transgene is present at a location on the chromosome other than the site of the endogenous characterizing gene. In a preferred embodiment, homologous recombination in bacteria is used for target-directed insertion of the key gene sequence into the genomic DNA for all or a portion of the characterizing gene, including sufficient characterizing gene regulatory sequences to promote expression of the characterizing gene in its endogenous expression pattern. In a preferred embodiment, the characterizing gene sequences are on a bacterial artificial chromosome (BAC). In specific embodiments, the key gene coding sequences are inserted as a 5′ fusion with the characterizing gene coding sequence such that the key gene coding sequences are inserted in frame and directly 3′ from the initiation codon for the characterizing gene coding sequences. In another embodiment, the key gene coding sequences are inserted into the 3′ untranslated region (UTR) of the characterizing gene and, preferably, have their own internal ribosome entry sequence (IRES).

[0220] The vector (preferably a BAC) comprising the key gene coding sequences and characterizing gene sequences is then introduced into the genome of a potential founder animal to generate a line of transgenic animals. Potential founder animals can be screened for the selective expression of the key gene sequence in the population of cells characterized by expression of the endogenous characterizing gene. Transgenic animals that exhibit appropriate expression (e.g., detectable expression of the key gene product having the same expression pattern within the animal as the endogenous characterizing gene) are selected as founders for a line of transgenic animals.

[0221] Animals in which the native DIAPH3 expression is interrupted are also provided. Such animals can be initially produced by promoting homologous recombination between a DIAPH3 gene in its chromosome and an exogenous DIAPH3 gene that has been rendered biologically inactive. Preferably the sequence inserted includes a heterologous sequence, e.g., an antibiotic resistance gene. In a preferred aspect, this homologous recombination is carried out by transforming embryo-derived stem (ES) cells with a vector containing an insertionally inactivated gene, wherein the active gene encodes DIAPH3, such that homologous recombination occurs; the ES cells are then injected into a blastocyst, and the blastocyst is implanted into a foster mother, followed by the birth of the chimeric animal. Such an animal is also called a “knockout animal,” in which DIAPH3 has been inactivated (see Capecchi, Science 244:1288-1292 (1989)). The chimeric animal can be bred to produce additional knockout animals. Chimeric animals can be and are preferably non-human mammals such as mice, hamsters, sheep, pigs, cattle, etc. In a specific embodiment, a knockout mouse is produced.

[0222] Such knockout animals are expected to develop or be predisposed to developing diseases or disorders involving T cell underproliferation and thus can have use as animal models of such diseases and disorders, e.g., to screen for or test molecules for the ability to promote activation or proliferation and thus treat or prevent such diseases or disorders.

[0223] Knockouts, including tissue-specific knockouts (in which the gene of interest is inactivated in particular tissues), can also be made by methods known in the art. Accordingly, the invention provides a transgenic animal that comprises a recombinant non-human animal in which a gene encoding a protein comprising SEQ ID NO: 3, or a naturally-occurring variant of the same, has been inactivated by a method comprising introducing a nucleic acid into the plant or animal or an ancestor thereof, which nucleic acid or a portion thereof becomes inserted into or replaces said gene, or a progeny of such animal in which said gene has been inactivated.

### 5.12 Imaging

[0224] The present invention also provides methods for imaging a portion of a patient, particularly imaging a breast cancer tumor within a breast cancer patient, by administration of a sufficient amount of a labeled antibody of the instant invention, i.e., an antibody that binds specifically to a protein the amino acid sequence of which consists of SEQ ID NO: 3, or a fragment thereof. The antibody is labeled, preferably with a radioisotope. Preferably, the antibody binds detectably to a protein the amino acid sequence of which consists of SEQ ID NO: 3, but not detectably above background to any other protein, although it may bind to other proteins that do not interfere with the imaging results. In a specific embodiment, the antibody binds to an epitope present in amino acids 1110-1152 of SEQ Id NO: 3.

[0225] A wide variety of metal ions suitable for in vivo tissue imaging have been tested and utilized clinically, and may be used to label the antibody for imaging purposes. For imaging with radioisotopes, the following characteristics are generally desirable: (a) low radiation dose to the patient; (b) high photon yield which permits a nuclear medicine procedure to be performed in a short time period; (c) ability to be produced in sufficient quantities; (d) acceptable cost; (e) simple preparation for administration; and (f) no requirement that the patient be sequestered subsequently. These characteristics generally translate into the following: (a) the radiation exposure to the most critical organ is less than 5 rad; (b) a single image can be obtained within several hours after infusion; (c) the radioisotope does not decay by emission of a particle; (d) the isotope can be readily detected; and (e) the half-life is less than four days (Lamb and Kramer, “Commercial Production of Radioisotopes for Nuclear Medicine”, In Radiotracers For Medical Applications, Vol. 1, Rayudu (Ed.), CRC Press, Inc., Boca Raton, pp. 17-62). Preferably, the metal is technetium-99.

[0226] The targets that one may image include any breast cancer tumor associated with an increase in the expression of the gene encoding the DIAPH3 protein (SEQ ID NO: 3). One may use such labeled antibodies according to the present invention in vivo (e.g., using radiotherapeutic metal complexes) upon administration to a patient, or in vitro (e.g., using a radiometal or a fluorescent metal complex), to diagnose breast cancer, to prognose breast cancer, to assess the progress of a breast cancer, with or without treatment. Such use in vitro may comprise contacting fresh cells obtained directly from a tumor taken from a breast cancer patient, cells that have been frozen and thawed, or cell lines derived from any breast cancer tumor. Thus, in one embodiment, the invention provides a method of imaging a breast cancer tumor, comprising contacting cells of said tumor with an antibody that binds specifically to a protein the amino acid sequence of which consists of SEQ ID NO: 3, wherein said antibody is labeled, and detecting said label. In a specific embodiment, said contacting is performed in vivo in a breast cancer patient. In a more specific embodiment, said imaging is used to support a diagnosis of breast cancer. In another more specific embodiment, said imaging is used to support a prognosis of an individual having breast cancer. In another specific embodiment, said contacting is performed in vitro using breast cancer tumor cells in culture.

[0227] A breast cancer tumor may be imaged, for example, by administering to a subject an effective amount of an antibody containing a label in which the label is radioactive, and recording the scintigraphic image of a breast of said subject obtained from the decay of the radioactive metal. Likewise, a magnetic resonance (MR) image of a breast cancer tumor in a subject may be imaged by administering to the subject an effective amount of an antibody composition containing a metal in which the metal is paramagnetic, and recording the MR image of an internal region of the subject.

[0228] Other methods include enhancing a sonographic image of an internal region of a subject comprising administering to a subject an effective amount of an antibody containing a metal and recording the sonographic image of an internal region of the subject. In this latter application, the metal is preferably any non-toxic heavy metal ion. A method of enhancing an X-ray image of an internal region of a subject is also provided which comprises administering to a subject an antibody containing a metal, and recording the X-ray image of an internal region of the subject. A radioactive, non-toxic heavy metal ion is preferred.

[0229] The antibodies may be linked to a variety of labels. Such labels include, but are not limited to, radioactive substances (e.g. ¹¹¹In, ¹²⁵I, ¹³¹I, ^{99m}Tc, ²¹²B, ⁹⁰Y, ¹⁸⁶Rh); biotin; fluorescent tags; or imaging reagents (e.g. those described in U.S. Pat. No. 4,741,900 and U.S. Pat. No. 5,326,856).

### 6. EXAMPLES

### Example 1

### Full-Length Human DIAPH3 Gene as a Marker for Poor Prognosis of Breast Cancer

[0230] A study was undertaken to identify human genes the expression of which differed in breast cancer tumor cells in comparison to non-cancerous cells. The details of these experiments are disclosed in International Publication No. WO 02/103320, published Dec. 27, 2002, entitled “Diagnosis and Prognosis of Breast Cancer Patients,” which is incorporated herein by reference in its entirety. In these experiments, a set of 231 markers was identified whose up-regulation or down-regulation correlated with either good or poor prognosis, where poor prognosis is defined as the development in a patient of a distant metastasis within five years of initial diagnosis.

[0231] Array data indicated that three of these 231 markers, Contig28552, and Contig46218, and a partial cDNA, AL137718, the expression of each of which is highly correlated with poor prognosis, were overexpressed in poor-prognosis breast cancer patients. AL137718, Contig28552 and Contig46218 are located at the same chromosome locus, 13q21.2, and span about 340 kb. AL137718 lacks a stop codon upstream of the putative starting methionine and its 3′ is also shorter than the mouse ortholog, AF094519, indicating the possibility of additional 5′ and 3′ coding regions. A UCSC BLAT search (available on the Internet at genome-test.cse.ucsc.edu/cgi-bin/hgBlat?hgsid=1719513) revealed an Acembly gene prediction that extended the ORF in both 5′ and 3′ regions of AL137718 and also overlapped with Contig28552. This prediction (Hs13_{—}10007_{—}28_{—}4_t13_Hs13_{—}10007_{—}28_{—}5_{—}494.b; FIG. 3) served as a template for designing RT-PCR and sequencing primers. Additional primers were designed using the Phil Green predicted sequence of Contig46218.

[0232] Materials and Methods

[0233] A variety of overlapping RT-PCR products was created using a Qiagen One-Step RT-PCR kit (Qiagen, Valencia, Calif.) following the manufacturer's protocol and the primer pairs listed in Table 3. The RT-PCR input RNA was either 5 ng breast adenocarcinoma tRNA (MDA-MB361, Ambion, Inc., Austin, Tex.), or cytoplasmic RNA purified from a human breast-cancer cell line, ZR-75-1 (ATCC, Manassas, Vs.) using RNeasy Midi kit per manufacturer's instructions (Qiagen, Valencia, Calif.). The reactions were cycled in a Gene Amp PCR System 9700 Thermocycler (Applied Biosystems, Foster City, Calif.) as follows: 1) Reverse Transcription, 30 minutes at 50° C.; 2) initial PCR activation step of 15 minutes at 95° C.; 3) 1 minute of denaturation at 94° C., 1 minute of annealing at 68° C., and extension for 1 minute, 45 seconds at 72° C. for 40 cycles; 4) completion with a final extension of 10 minutes at 72° C. 10 μl of the resulting reaction product was electrophoresed on a 1% agarose (Invitrogen, Carlsbad, Calif.) gel stained with 0.5 μg/ml ethidium bromide (Fisher Biotech, Fair Lawn, N.J.). The gel was visualized and photographed with an ultraviolet light box.

[0234] 3 μl of the RT-PCR product was used in a cloning reaction employing the reagents and instructions provided with the TOPO TA cloning kit (Invitrogen, Carlsbad, Calif.). 2 μl of the cloning reaction was used to transform TOP10 chemically competent Escherichia coli provided with the cloning kit following the manufacturer's instructions. Transformed cells were spread on LB agar plates containing 100 μg/ml Ampicillin (Sigma, St. Louis, Mo.) and 80 μg/ml X-GAL (5-Bromo-4-chloro-3-indoyl-D-galactoside, Sigma, St. Louis, Mo.). Plates were incubated overnight at 37° C. White colonies were picked from the plates and used to seed 2ml cultures of liquid LB medium supplemented with 100 μg/ml Ampicillin. These cultures were incubated overnight at 37° C. in a shaking incubator. Plasmid DNA was extracted from these cultures using the Qiagen (Valencia, Calif.) Qiaquick Spin Miniprep kit following the manufacturer's protocol. 1 μl of each DNA miniprep was digested 1 hour at 37° C. with 1 82 l of the restriction enzyme EcoRI (provided at 10 units/μl by Gibco/Invitrogen, Carlsbad, Calif.). The digestion reaction was electrophoresed on a 1% agarose gel and the DNA bands were visualized and photographed on a UV light box to determine which plasmid clones generated EcoRI fragments of the expected size.

[0235] Sequencing reactions used 8 μl of miniprep or PCR product, 4 μl of primer (at 1 μM), and 8 μl of BigDye Terminator Cycle Sequencing Ready Reaction (Applied Biosystems, Foster City, Calif.). Primers used in sequencing are listed in Table 3. PCR sequencing reactions were carried out using Gene Amp PCR System 9700 (Applied Biosystems, Foster City, Calif.) using the PCR conditions in the instructions supplied with the Ready Reaction kit. Sequencing reactions were purified using the DyeEx Spin Kit (Qiagen, Valencia, Calif.) and dried for 20 minutes on low heat in a Speed Vac Plus (SC110A, from Savant, Holbrook, N.Y.) attached to a Universal Vacuum Sytem 400 (also from Savant). The reactions were resuspended in 3 μl of a 6 to 1 mixture of formamide (Sigma, St. Louis, Mo.) with 25 mM EDTA (Sigma) and 50 mg/ml dextran blue (Sigma). The reactions were then heated to 100° C. for 2 minutes and chilled on ice. The DNA was sequenced on an ABI 377 DNA Sequencer. The sequencing gel was prepared using a Long Ranger Singel Pack (BioWhittaker Molecular Applications, Rockland, Me.) according to the manufacturer's instructions. 2 μl of the sequencing reaction were loaded into each well of the gel. The gel was run for 3.5 hours using the 36E 2400 run module, the dye set DT (BD set Any Primer) and the dRHOD Matrix. Sequencing results were analyzed, edited, and compiled into contiguous sequences using the program Sequencher (Gene Codes, Ann Arbor, Mich.).

TABLE 3

Primers used for reverse transcription
or sequencing.

| | | |
|---|---|---|
| | | SEQ ID |
| Primer Name | Primer sequence | NO |

| | | |
|---|---|---|
| M13 Forward (−20) | GTAAAACGACGGCCAGT | 7 |
| M13 Reverse | GGAAACAGCTATGACCATG | 8 |
| MB9 | TAATACGACTCACTATAGGG | 9 |
| DIAPH3_4_2 | GCAGATTATCCATCACTCCTGTCT | 10 |
| PG46218_1 | GAAATTGCAATCCCAAGTTTATTC | 11 |
| PG46218_2 | CATCTTTCTAAGCCACTGGAATTT | 12 |
| DIAPH3_81_F | GACTTCAGCGGTTGGGCTAGGCTG | 13 |
| DIAPH3_2558_R | GCTCAGGTTCACATAAGTTGC | 14 |
| DIAPH3_1831_F | GATTAATGAGCTTCAAGCAGAGC | 15 |
| DIAPH3_2067_F | CCCTGGGATTCCTTGGAGGAC | 16 |
| DIAPH3_2067_R | GTCCTCCAAGGAATCCCAGGG | 17 |
| DIAPH3_1 | TAGATTCTAAAATTGCCCAGAACC | 18 |
| DIAPH3_2_F | ACCTTCGGATTTAACCTTAGCTCT | 19 |
| DIAPH3_2_R | AGAGCTAAGGTTAAATCCGAAGGT | 20 |
| DIAPH3_3_F | ATGAGACACTTTCGAAGTTACACG | 21 |
| DIAPH3_3_R | CGTGTAACTTCGAAAGTGTCTCAT | 22 |
| DIAPH3_4_2 | AGACAGGAGTGATGGATAATCTGC | 23 |
| DIAPH3.e1.130.F | CGGGAGTAAAACCTGTTGTCGA | 24 |
| DIAPH3.e1.218.F | AAAGATGGAACGGCACCAGCC | 25 |
| DIAPH3.e1.381.R | GAAACTTGGGGCGCTTCTCCCC | 26 |
| DIAPH3.e2.517.F | GCAGTGATTGCTCAGCAGCACCTT | 27 |
| DIAPH3.e2.517.R | AAGGTGCTGCTGAGCAATCACTGC | 28 |
| DIAPH3.e3.671.F | CAAAAAAGAAATGGTGATGCAGTA | 29 |
| DIAPH3.e3.671.R | ATGACGTAGTGGTAAAGAAAAAAC | 30 |
| DIAPH3.1296.F | CTTCACATCAGAAATGAATTTATG | 31 |
| DIAPH3.1296.R | CATAAATTCATTTCTGATGTGAAG | 32 |
| DIAPH3.1779.R | CTGAGTTTCTTGGTGGTCGGTAAA | 33 |
| DIAPH3_45_F | GTGGCGGGAGTTTTCAGAT | 34 |
| BG203073_1_F | TGACAGAAGGGTCACGTTCA | 35 |
| BG203073_1_R | TGAACGTGACCCTTCTGTCA | 36 |
| BG203073_2_F | GGATCAAGGCAGCTGAGAAG | 37 |
| BG203073_2_R | CTTCTCAGCTGCCTTGATCC | 38 |
| Contig28552_1F | GGACTGAGACTCTGCCGAAC | 39 |
| Contig28552_1R | GTTCGGCAGAGTCTCAGTCC | 40 |
| Contig28552_2F | CGAGTCTTTCTCGCTCTGCT | 41 |
| Contig28552_2R | AGCAGAGCGAGAAAGACTCG | 42 |
| Contig46218_2_F | TGCATTTGGCAAAGAGAGTG | 43 |
| Contig46218_2_R | CACTCTCTTTGCCAAATGCA | 44 |
| Contig46218_3_R | TGATGATAATGGGGTCACCA | 45 |

[0236] Results

[0237] The resulting sequence, named DIAPH3, showed high homology to the mouse diaphanous-related formin protein (Dia2) gene. The sequence of the full-length DIAPH3 cDNA is presented in FIG. 1 (SEQ ID NO: 1). The DIAPH3 protein (SEQ ID NO: 3) contains 1152 amino acid residues, and is predicted to contain an FH2 domain between amino acid residues 636 and 1077. Clustering analysis demonstrated that the three prognosis markers, and therefore DIAPH3, are co-expressed with mitosis-related genes such as human regulator of cytokinesis protein PRC-1 (Jiang et al., Mol. Cell. 2(6):877-85 (1998)), HEC (Chen et al., Mol. Cell Biol. 17(10):6049-6056 (1997)), and ECT2 (Tatsumoto et al., J. Cell Biol. 147(5):921-927 (1999)) (see FIG. 4). This corresponds with DIAPH3's expected role in cytoskeletal rearrangements.

### Example 2

### Effect of Disruption of Human DIAPH3 on Cell Viability and Mitotic Spindle Formation

[0238] Materials and Methods

[0239] siRNA Transfection in 96-well plates. Small interfering RNA (siRNA) transfection is used to reduce the levels of mRNA for the targeted gene. This lowering of the amount of mRNA can cause lowering of the amount of the protein encoded by the targeted gene. The phenotype of loss of function of a gene can then be determined.

[0240] One day prior to transfection, 100 μL of HeLa cells grown in DMEM/10% fetal bovine serum (Invitrogen, Carlsbad, Calif.) to approximately 90% confluency were seeded in a 96-well tissue culture plate (Corning, Corning, N.Y.) at approximately 1500 cells/well. For each transfection 85 μL of OptiMEM (Invitrogen) was mixed with 5 μL siRNA (Dharmacon, Denver, Colo.) from a 20 μM stock. For each transfection 5 μL OptiMEM was mixed with 5 uL Oligofectamine reagent (Invitrogen) and incubated for 5 minutes at room temperature. The 10 μL OptiMEM/Oligofectamine mixture was dispensed into each tube with the OptiMEM/siRNA mixture, mixed and incubated 15-20minutes at room temperature. 10 μL of the transfection mixture was dispensed into each well of the 96-well plate and incubated 4 hrs at 37° and 5% CO₂. After 4 hours, 100 μL/well of DMEM/10% fetal bovine serum was added and the plates were incubated at 37° C. and 5% CO₂ for 72 hours.

[0241] Crystal Violet Assay for Cell Growth. Crystal violet stains protein and is used as a measure of the number of cells. 72 hours after transfection with siRNAs, the crystal violet assay was done to determine whether the reduction of DIAPH3 mRNA levels by siRNA results in reduced cell growth and/or increased cell death.

[0242] Medium was removed from wells and the cells were washed once with 100 μL/well PBS (Invitrogen). The PBS was removed from the wells and replaced with 100 μL of 100% methanol (Fisher Scientific, Fairlawn, N.J.). The plates were then incubated for approximately 5 minutes at room temperature. The methanol was removed from the wells and the plates were allowed to air dry for approximately 5 minutes. The wells were then stained with 100 μL/well aqueous crystal violet at 0.1% w/v (Sigma, St. Louis, N.J.) for 5 minutes. The stain was removed from the wells and the wells were washed three times in water. 100 μL of 33.3% acetic acid (Fisher Scientific) was added to each well. The plates were incubated 5 minutes at room temperature. The plates were gently agitated to completely mix solubilized stain and the OD of plate at 590 nm was read on the SpectraMax plus plate reader (Molecular Devices, Sunnyvale, Calif.) using Softmax Pro 3.1.2 software (Molecular Devices). The ODs at 590 nM for the DIAPH3 siRNAs were compared to mock treated (no siRNA in the transfection) and luciferase siRNA transfected cells. The OD 590 nM for luciferase was considered to be 100%.

[0243] siRNA tranfection in slide chambers. One day prior to transfection, 200 μL of HeLa cells grown in DMEM/10% fetal bovine serum (Invitrogen) to approximately 90% confluency were seeded in an 8-chamber microscope slide (Corning, Corning, N.Y.) at 3000 cells/chamber. For each transfection 85 μL of OptiMEM (Invitrogen) was mixed with 5 μL siRNA (Dharmacon) from a 20 μM stock. For each transfection 5 μL OptiMEM was mixed with 5 μL Oligofectamine reagent (Invitrogen) and incubated 5 minutes at room temperature. The 10 L OptiMEM/Oligofectamine mixture was dispensed into each tube with the OptiMEM/siRNA mixture, mixed and incubated 15-20minutes at room temperature. 15 μL of the transfection mixture was dispensed into each chamber of the 8-chamber slide and incubated 4 hrs at 37° and 5% CO₂. After 4 hours, 100 μL/well of DMEM/10% fetal bovine serum was added and the slides were incubated at 37° and 5% CO₂ for 72 hours.

[0244] Staining of slides with anti-α-tubulin antibody and Hoechst dye. 72 hours post transfection, slides were stained with anti-α-tubulin antibody and Hoechst 33342 dye to visualize localization of mitotic spindles and DNA. The medium was removed from the slide chambers and replaced with 200 μL/well of a solution composed of TBST (10 mM Tris-HCL pH 8.0 (Sigma), 150 mM sodium chloride (Sigma), 0.5% Tween20 (Fisher Scientific)), 5 mg/ml BSA (Fisher Scientific) and 2 μL/ml of FITC conjugated α-tubulin antibody (Sigma). The slides were incubated overnight at room temperature and then washed three times with TBST containing 10 μg/ml Hoechst 33342 dye (Sigma). The chambers were incubated 5 minutes in each wash. The TBST/Hoechst washes were followed by 30-minute incubation in PBS. The slides were briefly washed again in PBS. After the removal of the PBS wash, the slide chambers were removed and the slide was allowed to dry. When the slide was dry, a small drop of Flouromount-G (Southern Biotechnology Associates, Inc., Birmingham, Ala.) was added to the slide surface and a coverslip was placed on top. The Flouromount-G was allowed to dry at least 30 minutes before slides were photographed on the Delta Vision Deconvoluting Microscope (Applied Precision, Issaquah, Wash.). Slide photographs were processed using the Delta Vision Sofware.

[0245] Results

[0246] DIAPH3 siRNAs inhibit the growth of cells in cell culture. HeLa cells were transfected with one of two DIAPH3 siRNAs designated DIAPH3-1555 and DIAPH3-1805, an siRNA for luciferase, or were mock-transfected. DIAPH3-1555, an siRNA has the nucleotide sequence GAGUUUACCGACCACCAAGtt (SEQ ID NO: 274). DIAPH3-1805 has the nucleotide sequence UGCGGAUGCCAUUCAGUGGtt (SEQ ID NO: 275). The cells were stained at 72 hours with Crystal Violet, and the number of luciferase siRNA-transfected cells was used as a baseline for determining effects on cell growth. Cells transfected with the DIAPH3-1555 siRNA showed approximately 58%, and cells transfected with DIAPH3-1805 approximately 48% of the amount of Crystal Violet staining shown by luciferase siRNA-transfected cells (FIG. 5). In another experiment, two additional siRNAs, DIAPH3-296 and DIAPH3-2240, showed 92% and 70%, respectively, the level of Crystal Violet staining compared to the luciferase control (data not shown). Thus, DIAPH3 siRNAs are effective at reducing the rate of cell growth.

[0247] In addition to the effect on cell growth, the DIAPH3 siRNAs cause several striking physiological effects. Most notably, the inhibition of DIAPH3 causes a change in the number of mitotic spindles; rather than the normal two (FIG. 6A), DIAPH3-1555 and DIAPH3-1805 (FIGS. 6B, 6C, respectively) can cause cells to form three or even four mitotic spindles. Treatment of cultures of the cells with DIAPH3 siRNAs resulted in a sharp increase in the number of cells displaying aberrant spindle formation, with approximately 50% of DIAPH3-1555-treated cultures and 39% of DIAPH3-1805-treated cultures displaying aberrant spindles (FIG. 7). In comparison, only approximately 4% of cells in luciferase siRNA control cultures displayed aberrant spindle formation.

[0248] DIAPH3 siRNAs also cause the formation of multinucleate cells (FIGS. 8A-8C) and cells with micronuclei. FIG. 8A depicts control cells transfected with a luciferase reporter gene, showing normal nuclei. In contrast, FIGS. 8B and 8C show multinucleate cells resulting from transfection with siRNA DIAPH3-1805 and DIAPH3-1555, respectively. 22% of DIAPH3-1555-treated cells exhibited multinucleation, and 12% displayed micronucleation, as compared to 10% and 2% for mock-treated cells, respectively (FIG. 9). DIAPH3-1805 cells were even more likely to display multinucleation (32%) or micronucleation (24%) (FIG. 9).

### 7. References Cited

[0249] All references cited herein are incorporated herein by reference in their entirety and for all purposes to the same extent as if each individual publication or patent or patent application was specifically and individually indicated to be incorporated by reference in its entirety for all purposes.

[0250] Many modifications and variations of the present invention can be made without departing from its spirit and scope, as will be apparent to those skilled in the art. The specific embodiments described herein are offered by way of example only, and the invention is to be limited only by the terms of the appended claims along with the full scope of equivalents to which such claims are entitled.

The application's sequence listing, which the Patent Office published only in electronic form, follows.

SEQUENCE LISTING (275 sequences)

SEQ ID NO: 1 - DNA, 4331 bp, Homo sapiens
cgggagtaaaacctgttgtcgatccctcagcttccagcttgcggcttgctgagtggccaccttctttccggtccccggagctgcggggaaagatggaacggcaccagccgcggctgcaccacccggcccaaggctcagccgctgggactccctacccttcctcagcctctctccgcggctgccgggaaagcaagatgccgcgcaggaagggcccccaacaccctccgccgcccagtggccccgaggagcctggggagaagcgccccaagtttcatttaaatattaggacactgacggatgatatgctggacaaatttgccagcataagaattccagggagcaagaaagagagacctccacttcccaacctgaagactgcatttgcaagcagtgattgctcagcagcacctttagagatgatggagaactttccaaagccactgtcagagaatgaactcttagaactttttgaaaaaatgatggaagatatgaatttaaatgaagataaaaaggcaccattgcgggaaaaggacttcagtatcaaaaaagaaatggtgatgcagtacattaatactgcttctaagacaggaagtcttaagagaagccgacagatctcacctcaggaattcattcatgagctgaaaatggggtctgcagatgagagacttgtcacatgcctggagtctctccgagtgtctttgaccagcaatcctgtgagttgggtggaaagctttggacatgaagggcttggattattattagacattttggaaaaactgattagtggaaaaatccaagaaaaagttgtaaagaaaaatcaacataaagtcatacagtgtctaaaagccctgatgaatacgcagtatggcttggaaagaattatgagtgaggagaggagcctttccttattggccaaagccgtggatcccagacaccccaatatgatgacagatgtggttaaacttctctctgcggtatgcattgtaggggaagaaagcatccttgaagaagttttagaagctttaacttcagctggtgaagaaaaaaaaattgacagatttttttgtattgtggaaggcctccggcacaattcagttcaactgcaagtagcttgtatgcagctcatcaatgccctggttacatctcctgatgatttggatttcaggcttcacatcagaaatgaatttatgcgttgtggattgaaagagatattgccaaatttaaaatgcattaagaatgatggcctggatatccaacttaaagtctttgatgagcataaagaagaagatttgtttgagttatcccatcgccttgaagatattagagctgaacttgatgaagcatatgatgtttacaacatggtgtggagcacagttaaagaaactagagcagagggatattttatttctattcttcagcatcttttgctgattcgaaatgattattttataaggcaacaatacttcaaattaattgatgagtgtgtatcccagattgtattgcatagagatggaatggatccagacttcacatatcgaaaaagactagatttagatttaacccagtttgtagacatttgcatagatcaagcaaaactagaagagtttgaagagaaagcatcagaactttacaagaaatttgaaaaagagtttaccgaccaccaagaaactcaggctgaattgcagaaaaaagaggcaaagattaatgagcttcaagcagagctacaagcttttaagtctcagtttggtgccttgccagctgattgtaatattcctttgcctccctctaaagaaggtggaactggccactcagcacttcctcctccgcctccactgccttctggtggaggggtgccgcctccacctcctcccccaccacctcctccacttccaggaatgcggatgccattcagtggtcctgtgcctccaccacctcccctgggattccttggaggacaaaattctcctcctctaccaatcctgccatttgggttgaaaccaaagaaagaatttaaacctgaaatcagcatgagaagattgaattggttaaagatcagacctcatgaaatgactgaaaactgtttctggataaaagtaaatgaaaataagtatgaaaacgtggatttgctttgtaaacttgagaatacattttgttgccaacaaaaagagagaagagaagaggaagatattgaagagaagaaatcgattaagaaaaaaattaaagaacttaagtttttagattctaaaattgcccagaacctttcaatcttcctgagctcttttcgggtgccatatgaggaaatcagaatgatgatattggaagtagatgaaacacggttggcagagtctatgattcagaacttaataaagcatcttcctgatcaagagcaattaaattcattgtctcagttcaagagtgaatatagcaacttatgtgaacctgagcagtttgtggttgtgatgagcaatgtgaagagactacggccacggctcagtgctattctctttaagcttcagtttgaagagcaggtgaacaacatcaaacctgacatcatggctgtcagtactgcctgcgaagagataaagaagagcaaaagctttagcaagttgctggaacttgtattgctaatgggaaactacatgaatgctggctcccggaatgctcaaaccttcggatttaaccttagctctctctgtaaactaaaggacacaaaatcagcagatcagaaaacaacgctacttcatttcctggtagaaatatgtgaagagaagtaccctgatatactgaattttgtggatgatttggaacctttagacaaagctagtaaagtctctgtagaaacgctggaaaagaatttgaggcagatgggaaggcagcttcaacagcttgagaaggaattggaaacctttccccctcctgaggacttgcatgacaagtttgtgacaaagatgtccagatttgttatcagtgcaaaagaacaatatgagacactttcgaagttacacgaaaacatggaaaagttataccagagtataataggatactatgccattgatgtgaagaaggtgtctgtggaagactttcttactgacctgaataacttcagaaccacattcatgcaagcaataaaggagaatatcaaaaaaagagaagcagaggaaaaagaaaaacgtgtcagaatagctaaagaattagcagagcgagaaagactcgaacgccaacaaaagaaaaagcgtttattagaaatgaagactgagggtgatgagacaggagtgatggataatctgctggaggccttgcagtccggggctgccttccgcgacagaagaaaaaggacaccgatgccaaaagatgttcggcagagtctcagtccaatgtctcagaggcctgttctgaaagtttgtaaccatgaaaatcagaaagtgcagttaacagaagggtcacgttcacactacaatatcaattgcaactcaacaaggactccagtcgccaaggagcttaattataatctagacactcatacgtctactagggaggatcaaggcagctgagaagaaggaagcgtgtaatgtagaaagcaacagaaaaaaggaaacggaacttcttggctctttttctaaaaatgaatcagttcccgaagttgaagccctgctggcaagattacgagctttataagttaaactggtttttaaaaaaatgattaagccaaatataaagccatgctctaaactatacccttgaaaaaattgctttatgtaagtgacttatatagtttaaattatgatatatatagaaaaataaagctaaatatatgattgcaatgcttttctatgtactggaggttttggttattcaagattgtaccggcttaatcctttttttttttttgtctcctggtattcctcagttctttatttggtggttaaattatacatattgctttagagagcaggtaggtggccatgtgttcagcagtgtgtccttaagaaaataccatctttctaagccactggaatttttactttactatttttaacattaatggatgtcaggtcatcaacctcaagtctttacatatccatgtatattccatatatattgtttatataggcccaagtttctccttaattgggatctatatactaccagcacaacatcaaaaacatgtaattgaatacatcagagctatatatgtaaggaaatgactggtgaccccattatcatcattgttgaattcatgttaagtagaccctctaggggaccataaggcaattgagcacataacgaaaaatgatgcaataagaatgtatgcactctctttgccaaatgca

SEQ ID NO: 2 - DNA, 3459 bp, Homo sapiens
atggaacggcaccagccgcggctgcaccacccggcccaaggctcagccgctgggactccctacccttcctcagcctctctccgcggctgccgggaaagcaagatgccgcgcaggaagggcccccaacaccctccgccgcccagtggccccgaggagcctggggagaagcgccccaagtttcatttaaatattaggacactgacggatgatatgctggacaaatttgccagcataagaattccagggagcaagaaagagagacctccacttcccaacctgaagactgcatttgcaagcagtgattgctcagcagcacctttagagatgatggagaactttccaaagccactgtcagagaatgaactcttagaactttttgaaaaaatgatggaagatatgaatttaaatgaagataaaaaggcaccattgcgggaaaaggacttcagtatcaaaaaagaaatggtgatgcagtacattaatactgcttctaagacaggaagtcttaagagaagccgacagatctcacctcaggaattcattcatgagctgaaaatggggtctgcagatgagagacttgtcacatgcctggagtctctccgagtgtctttgaccagcaatcctgtgagttgggtggaaagctttggacatgaagggcttggattattattagacattttggaaaaactgattagtggaaaaatccaagaaaaagttgtaaagaaaaatcaacataaagtcatacagtgtctaaaagccctgatgaatacgcagtatggcttggaaagaattatgagtgaggagaggagcctttccttattggccaaagccgtggatcccagacaccccaatatgatgacagatgtggttaaacttctctctgcggtatgcattgtaggggaagaaagcatccttgaagaagttttagaagctttaacttcagctggtgaagaaaaaaaaattgacagatttttttgtattgtggaaggcctccggcacaattcagttcaactgcaagtagcttgtatgcagctcatcaatgccctggttacatctcctgatgatttggatttcaggcttcacatcagaaatgaatttatgcgttgtggattgaaagagatattgccaaatttaaaatgcattaagaatgatggcctggatatccaacttaaagtctttgatgagcataaagaagaagatttgtttgagttatcccatcgccttgaagatattagagctgaacttgatgaagcatatgatgtttacaacatggtgtggagcacagttaaagaaactagagcagagggatattttatttctattcttcagcatcttttgctgattcgaaatgattattttataaggcaacaatacttcaaattaattgatgagtgtgtatcccagattgtattgcatagagatggaatggatccagacttcacatatcgaaaaagactagatttagatttaacccagtttgtagacatttgcatagatcaagcaaaactagaagagtttgaagagaaagcatcagaactttacaagaaatttgaaaaagagtttaccgaccaccaagaaactcaggctgaattgcagaaaaaagaggcaaagattaatgagcttcaagcagagctacaagcttttaagtctcagtttggtgccttgccagctgattgtaatattcctttgcctccctctaaagaaggtggaactggccactcagcacttcctcctccgcctccactgccttctggtggaggggtgccgcctccacctcctcccccaccacctcctccacttccaggaatgcggatgccattcagtggtcctgtgcctccaccacctcccctgggattccttggaggacaaaattctcctcctctaccaatcctgccatttgggttgaaaccaaagaaagaatttaaacctgaaatcagcatgagaagattgaattggttaaagatcagacctcatgaaatgactgaaaactgtttctggataaaagtaaatgaaaataagtatgaaaacgtggatttgctttgtaaacttgagaatacattttgttgccaacaaaaagagagaagagaagaggaagatattgaagagaagaaatcgattaagaaaaaaattaaagaacttaagtttttagattctaaaattgcccagaacctttcaatcttcctgagctcttttcgggtgccatatgaggaaatcagaatgatgatattggaagtagatgaaacacggttggcagagtctatgattcagaacttaataaagcatcttcctgatcaagagcaattaaattcattgtctcagttcaagagtgaatatagcaacttatgtgaacctgagcagtttgtggttgtgatgagcaatgtgaagagactacggccacggctcagtgctattctctttaagcttcagtttgaagagcaggtgaacaacatcaaacctgacatcatggctgtcagtactgcctgcgaagagataaagaagagcaaaagctttagcaagttgctggaacttgtattgctaatgggaaactacatgaatgctggctcccggaatgctcaaaccttcggatttaaccttagctctctctgtaaactaaaggacacaaaatcagcagatcagaaaacaacgctacttcatttcctggtagaaatatgtgaagagaagtaccctgatatactgaattttgtggatgatttggaacctttagacaaagctagtaaagtctctgtagaaacgctggaaaagaatttgaggcagatgggaaggcagcttcaacagcttgagaaggaattggaaacctttccccctcctgaggacttgcatgacaagtttgtgacaaagatgtccagatttgttatcagtgcaaaagaacaatatgagacactttcgaagttacacgaaaacatggaaaagttataccagagtataataggatactatgccattgatgtgaagaaggtgtctgtggaagactttcttactgacctgaataacttcagaaccacattcatgcaagcaataaaggagaatatcaaaaaaagagaagcagaggaaaaagaaaaacgtgtcagaatagctaaagaattagcagagcgagaaagactcgaacgccaacaaaagaaaaagcgtttattagaaatgaagactgagggtgatgagacaggagtgatggataatctgctggaggccttgcagtccggggctgccttccgcgacagaagaaaaaggacaccgatgccaaaagatgttcggcagagtctcagtccaatgtctcagaggcctgttctgaaagtttgtaaccatgaaaatcagaaagtgcagttaacagaagggtcacgttcacactacaatatcaattgcaactcaacaaggactccagtcgccaaggagcttaattataatctagacactcatacgtctactagggaggatcaaggcagctga

SEQ ID NO: 3 - protein, 1152 aa, Homo sapiens [sequence omitted]

SEQ ID NO: 4 - DNA, 2273 bp, Homo sapiens
gggggccagttaccatattgtccggagtgggtccttgacattcaggaaagatacatcctcagacctttcaaaatttgtcatgcctctctaacctaaaacagccctcattaaatgcactttaatccgagcactgtatggcttggaaagaattatgagtgaggagaggagcctttccttattggccaaagccgtggatcccagacaccccaatatgatgacagatgtggttaaacttctctctgcggtatgcattgtaggggaagaaagcatccttgaagaagttttagaagctttaacttcagctggtgaagaaaaaaaaattgacagatttttttgtattgtggaaggcctccggcacaattcagttcaactgcaagtagcttgtatgcagctcatcaatgccctggttacatctcctgatgatttggatttcaggcttcacatcagaaatgaatttatgcgttgtggattgaaagagatattgccaaatttaaaatgcattaagaatgatggcctggatatccaacttaaagtctttgatgagcataaagaagaagatttgtttgagttatcccatcgccttgaagatattagagctgaacttgatgaagcatatgatgtttacaacatggtgtggagcacagttaaagaaactagagcagagggatattttatttctattcttcagcatcttttgctgattcgaaatgattattttataaggcaacaatacttcaaattaattgatgagtgtgtatcccagattgtattgcatagagatggaatggatccagacttcacatatcgaaaaagactagatttagatttaacccagtttgtagacatttgcatagatcaagcaaaactagaagagtttgaagagaaagcatcagaactttacaagaaatttgaaaaagagtttaccgaccaccaagaaactcaggctgaattgcagaaaaaagaggcaaagattaatgagcttcaagcagagctacaagcttttaagtctcagtttggtgccttgccagctgattgtaatattcctttgcctccctctaaagaaggtggaactggccactcagcacttcctcctccgcctccactgccttctggtggaggggtgccgcctccacctcctcccccaccacctcctccacttccaggaatgcggatgccattcagtggtcctgtgcctccaccacctcccctgggattccttggaggacaaaattctcctcctctaccaatcctgccatttgggttgaaaccaaagaaagaatttaaacctgaaatcagcatgagaagattgaattggttaaagatcagacctcatgaaatgactgaaaactgtttctggataaaagtaaatgaaaataagtatgaaaacgtggatttgctttgtaaacttgagaatacattttgttgccaacaaaaagagagaagagaagaggaagatattgaagagaagaaatcgattaagaaaaaaattaaagaacttaagtttttagattctaaaattgcccagaacctttcaatcttcctgagctcttttcgggtgccatatgaggaaatcagaatgatgatattggaagtagatgaaacacggttggcagagtctatgattcagaacttaataaagcatcttcctgatcaagagcaattaaattcattgtctcagttcaagagtgaatatagcaacttatgtgaacctgagcagtttgtggttgtgatgagcaatgtgaagagactacggccacggctcagtgctattctctttaagcttcagtttgaagagcaggtgaacaacatcaaacctgacatcatggctgtcagtactgcctgcgaagagataaagaagagcaaaagctttagcaagttgctggaacttgtattgctaatgggaaactacatgaatgctggctcccggaatgctcaaaccttcggatttaaccttagctctctctgtaaactaaaggacacaaaatcagcagatcagaaaacaacgctacttcatttcctggtagaaatatgtgaagagaagtaccctgatatactgaattttgtggatgatttggaacctttagacaaagctagtaaaggtttgtgcctttttaagaaacatttcatggctctgatcttcagtgctaaaagactgaaaattataccttttatttgtatgtactttccactttctcacagtgttttcatacccaatatctcattttaaaaataaagagagttgtaggatattaaaaaaaaaaaaaaaaaaaaag

SEQ ID NO: 5 - DNA, 391 bp, Homo sapiens
gcaatttataaatacggtttattaccatggttacaaactttcagaacaggcctctgagacattggactgagactctgccgaacatcttttggcatcggtgtcctttttcttctgtcgcggaaggcagccccggactgcaaggcctccagcagattatccatcactcctgtctcatcaccctcagtcttcatttctaataaacgctttttcttttgttggcgttcgagtctttctcgctctgctaattctttagctattctgacacgtttttctttttcctctgcttctctttttttgatattctcctttattgcttgcatgaatgtggttctgaagttattcaggtcagtaagaaagtcttccacagacaccttcttcacatcaatggcat

SEQ ID NO: 6 - DNA, 726 bp, Homo sapiens
catttagtgcaagtagcaagtttatttcctttgatatagaattaacagagtaatgatgcccaaatgaggtaatattacatttgcttaggaaaactttccttgaaacacttatttagatctttgttaaagttattgattgtcagatcagagaaattgcaatcccaagtttattcataaaataaaaaaagttgttactttggaaatttcaaaatggcaattttatctcagagtcataattacaaggggaaaaatactctcttagccaagatcaagaatttcggcagcactgcaattctgtttacatccacgttacacaaaagcacatgcatttggcaaagagagtgcatacattcttattgcatcatttttcgttatgtgctcaattgccttatggtcccctagagggtctacttaacatgaattcaacaatgatgataatggggtcaccagtcatttccttacatatatagctctgatgtattcaattacatgtttttgatgttgtgctggtagtatatagatcccaattaaggagaaacttgggcctatataaacaatatatatggaatatacatggatatgtaaagacttgaggttgatgacctgacatccattaatgttaaaaatagtaaagtaaaaattccagtggcttagaaagatggtattttcttaaggacacactgctgaacacatggccacctacctgctctctaaagcaatatgtat

SEQ ID NO: 7 - DNA, 17 bp, ART-M13 Forward (-20)
gtaaaacgacggccagt

SEQ ID NO: 8 - DNA, 19 bp, ART-M13 Reverse
ggaaacagctatgaccatg

SEQ ID NO: 9 - DNA, 20 bp, ART-MB9
taatacgactcactataggg

SEQ ID NO: 10 - DNA, 24 bp, ART-DIAPH3_4_2
gcagattatccatcactcctgtct

SEQ ID NO: 11 - DNA, 24 bp, ART-PG46218_1
gaaattgcaatcccaagtttattc

SEQ ID NO: 12 - DNA, 24 bp, ART-PG46218_2
catctttctaagccactggaattt

SEQ ID NO: 13 - DNA, 24 bp, ART-DIAPH3_81_F
gacttcagcggttgggctaggctg

SEQ ID NO: 14 - DNA, 21 bp, ART-DIAPH3_2558_R
gctcaggttcacataagttgc

SEQ ID NO: 15 - DNA, 23 bp, ART-DIAPH3_1831_F
gattaatgagcttcaagcagagc

SEQ ID NO: 16 - DNA, 21 bp, ART-DIAPH3_2067_F
ccctgggattccttggaggac

SEQ ID NO: 17 - DNA, 21 bp, ART-DIAPH3_2067_R
gtcctccaaggaatcccaggg

SEQ ID NO: 18 - DNA, 24 bp, ART-DIAPH3_1
tagattctaaaattgcccagaacc

SEQ ID NO: 19 - DNA, 24 bp, ART-DIAPH3_2_F
accttcggatttaaccttagctct

SEQ ID NO: 20 - DNA, 24 bp, ART-DIAPH3_2_R
agagctaaggttaaatccgaaggt

SEQ ID NO: 21 - DNA, 24 bp, ART-DIAPH3_3_F
atgagacactttcgaagttacacg

SEQ ID NO: 22 - DNA, 24 bp, ART-DIAPH3_3_R
cgtgtaacttcgaaagtgtctcat

SEQ ID NO: 23 - DNA, 24 bp, ART-DIAPH3_4_2
agacaggagtgatggataatctgc

SEQ ID NO: 24 - DNA, 22 bp, ART-DIAPH3.e1.130.F
cgggagtaaaacctgttgtcga

SEQ ID NO: 25 - DNA, 21 bp, ART-DIAPH3.e1.218.F
aaagatggaacggcaccagcc

SEQ ID NO: 26 - DNA, 22 bp, ART-DIAPH3.e1.381.R
gaaacttggggcgcttctcccc

SEQ ID NO: 27 - DNA, 24 bp, ART-DIAPH3.e2.517.F
gcagtgattgctcagcagcacctt

SEQ ID NO: 28 - DNA, 24 bp, ART-DIAPH3.e2.517.R
aaggtgctgctgagcaatcactgc

SEQ ID NO: 29 - DNA, 24 bp, ART-DIAPH3.e3.671.F
caaaaaagaaatggtgatgcagta

SEQ ID NO: 30 - DNA, 24 bp, ART-DIAPH3.e3.671.R
atgacgtagtggtaaagaaaaaac

SEQ ID NO: 31 - DNA, 24 bp, ART-DIAPH3.1296.F
cttcacatcagaaatgaatttatg

SEQ ID NO: 32 - DNA, 24 bp, ART-DIAPH3.1296.R
cataaattcatttctgatgtgaag

SEQ ID NO: 33 - DNA, 24 bp, ART-DIAPH3.1779.R
ctgagtttcttggtggtcggtaaa

SEQ ID NO: 34 - DNA, 19 bp, ART-DIAPH3_45_F
gtggcgggagttttcagat

SEQ ID NO: 35 - DNA, 20 bp, ART-BG203073_1_F
tgacagaagggtcacgttca

SEQ ID NO: 36 - DNA, 20 bp, ART-BG203073_1_R
tgaacgtgacccttctgtca

SEQ ID NO: 37 - DNA, 20 bp, ART-BG203073_2_F
ggatcaaggcagctgagaag

SEQ ID NO: 38 - DNA, 20 bp, ART-BG203073_2_R
cttctcagctgccttgatcc

SEQ ID NO: 39 - DNA, 20 bp, ART-Contig28552_1F
ggactgagactctgccgaac

SEQ ID NO: 40 - DNA, 20 bp, ART-Contig28552_1R
gttcggcagagtctcagtcc

SEQ ID NO: 41 - DNA, 20 bp, ART-Contig28552_2F
cgagtctttctcgctctgct

SEQ ID NO: 42 - DNA, 20 bp, ART-Contig28552_2R
agcagagcgagaaagactcg

SEQ ID NO: 43 - DNA, 20 bp, ART-Contig46218_2_F
tgcatttggcaaagagagtg

SEQ ID NO: 44 - DNA, 20 bp, ART-Contig46218_2_R
cactctctttgccaaatgca

SEQ ID NO: 45 - DNA, 20 bp, ART-Contig46218_3_R
tgatgataatggggtcacca

SEQ ID NO: 46 - DNA, 443 bp, Homo sapiens
tttttttttttttttccattaacccaacacaagtttatttactaagtcaagtcaaactgaggagtatttgtttctttggtagttggtagacaaagaatacatatacatattctatttcccattaagcattcgatcatgttacaaaacaatggcctagagaactatcattgaagatttaccaaatctgcctgaagcaaaatgtgataaactgcagaaatggtggagaatgacactggaagtcataaagttgattctcaaacacgggtttgaactgcataggaccgcttatatgcatattttgataaatatattgaaaatttttttggaaatttgcaacaatttaaaaaacttgcagatgcaccatgtagcttagaaatactgaaaaactaagaaaaaggtgtgtcatgaattcatataatatatgtagacactagtctatttta

SEQ ID NO: 47 - DNA, 4186 bp, Homo sapiens
gaacttatgtagcctcattatcccgctccgtgaggtgacaattgtggaaaaggcagacagctccagtgtgctccccagtcccttatccatcagcacccgaaacaggatgaccttcctatttgccaacttgaaagatagagactttctagtgcagaggatctcagatttcctgcaacagactacttccaaaatatattctgacaaggagtttgcaggaagttacaacagttcagatgatgaggtgtactctcgacccagcagcctcgtctcctccagcccccagagaagcacgagctctgatgctgatggagagcgccagtttaacctaaatggcaacagcgtccccacagccacacagaccctgatgaccatgtatcggcggcggtctcccgaggagttcaacccgaaattggccaaagagtttctgaaagagcaagcctggaagattcactttgctgagtatgggcaagggatctgcatgtaccgcacagagaaaacgcgggagctggtgttgaagggcatcccggagagcatgcgtggggagctctggctgctgctgtcaggtgccatcaatgagaaggccacacatcctgggtactatgaagacctagtggagaagtccatggggaagtataatctcgccacggaggagattgagagggatttacaccgctcccttccagaacacccagcttttcagaatgaaatgggcattgctgcactaaggagagtcttaacagcttatgcttttcgaaatcccaacatagggtattgccaggccatgaatattgtcacttcagtgctgctgctttatgccaaagaggaggaagctttctggctgcttgtggctttgtgtgagcgcatgctcccagattactacaacaccagagttgtgggtgcactggtggaccaaggtgtctttgaggagctagcacgagactacgtcccacagctgtacgactgcatgcaagacctgggcgtgatttccaccatctccctgtcttggttcctcacactatttctcagtgtgatgccttttgagagtgcagttgtggttgttgactgtttcttctatgaaggaattaaagtgatattccagttggccctagctgtgctggatgcaaatgtggacaaactgttgaactgcaaggatgatggggaggccatgaccgttttgggaaggtatttagacagtgtgaccaataaagacagcacactgcctcccattcctcacctccactccttgctcagcgatgatgtggaaccttaccctgaggtagacatctttagactcatcagaacttcctacgagaaattcggaactatccgggcagatttgattgaacagatgagattcaaacagagactgaaagtgatccagacgctggaggatactacgaaacgcaacgtggtacgaaccattgtgacagaaacttcctttaccattgatgagctggaagaactttatgctcttttcaaggcagaacatctcaccagctgctactggggcgggagcagcaacgcgctggaccggcatgaccccagcctgccctacctggaacagtatcgcattgacttcgagcagttcaagggaatgtttgctcttctctttccttgggcatgtggaactcactctgacgttctggcctcccgcttgttccagttattagatgaaaatggagactctttgattaacttccgggagtttgtctctgggctaagtgctgcatgccatggggacctcacagagaagctcaaactcctgtacaaaatgcacgtcttgcctgagccatcctctgatcaagatgaaccagattctgcttttgaagcaactcagtacttctttgaagatattaccccagaatgtacacatgttgttggattggatagcagaagcaaacagggtgcagatgatggctttgttacggtgagcctaaagccagacaaagggaagagagcaaattcccaagaaaatcgtaattatttgagactgtggactccagaaaataaatctaagtcaaagaatgcaaaggatttacccaaattaaatcaggggcagttcattgaactgtgtaagacaatgtataacatgttcagcgaagaccccaatgagcaggagctgtaccatgccacggcagcagtgaccagcctcctgctggagattggggaggtcggcaagttgttcgtggcccagcctgcaaaggagggcgggagcggaggcagtgggccgtcctgccaccagggcatcccaggcgtgctcttccccaagaaagggccaggccagccttacgtggtggagtctgttgagcccctgccggccagcctggcccccgacagcgaggaacactcccttggaggacaaatggaggacatcaagctggaggactcctcgccccgggacaacggggcctgctcctccatgctgatctctgacgacgacaccaaggacgacagctccatgtcctcatactcggtgctgagtgccggctcccacgaggaggacaagctgcactgcgaggacatcggagaggacacggtcctggtgcggagcggccagggcacggcggcactgccccggagcaccagcctggaccgggactgggccatcaccttcgagcagttcctggcctccctcttaactgagcctgccctggtcaagtactttgacaagcccgtgtgcatgatggccaggattaccagtgcaaaaaacatccggatgatgggcaagcccctcacctcggccagtgactatgaaatctcggccatgtccggctgacacgggcgccttcccgggggagtgggaggagagggaggggagggattttttatgttcttctgtgttgagttttttctttctttcttttaaattaaatatttattagtacctggcttgaagcctagtgttttcataatgtaattcaatgaaaactgttggagaaatatttaaacacctcaatgtaggtacattacactcttgttgcggggaggggatttaccagaatacagtttatttcgtgaattctaaaaaacaaaaagatgaatctgtcagtgatatgtgtgtattataacttattaatcttgctgttgagctgtatacatggtttaaaaaatagtactgtttaatgctaagtaaggcagcagtcatttgtgtattcaggctttttaaataaaattagagctgtaaggaaaatgaaaagccacaaatgcaagactgttcttaaatggaaggcatagtcagcgagggtaaatcctataccactttaggaagtattaaaaatatttttaagatttgaaatatatttcatagaagtcctctattcaaaatcatattccacagatgttccccttcaaagggaaaacatttggggttctaaacagttatgaaagtaagtgatttttacatgattccagaataacacttgtattgaccaatttagacagataccagaccaattttgcatttaagaaattgttctgattatttacgtcaactcattagaattcagtgaaaagtaacagtcttttgtcacagagaatctgaaagtagcagcaaagacagagggctcatgacaggtttttgcttttgctttgcttttgtttttgaaagagtaaaagtactgatgcttctgatactggatgtttagcttcttactgcaaaaacataagtaaaacagtcaactttaccatttccgtattctccatagattgaagaaatttataccacatatcgcatatgaccatctttccatcaaatcaatgtagagataatgtaaactgaaaaaaaatctgcaagataatgtaactgaatgttttaaaaacagaacttgtcactttatataaaagaatagtatgctctatttcctgaatggatgtggaaatgaaagctagcgcacctgcactttgaattcttgcttcttttttattactgttatgattttgctttttacagatgttggacgattttttcttctgattgttgaattcataatcatggtctcatttcctttgcttctttggaatatttctttcaacacattcctttattttattatacattgtgtcctttttttagctattgctgctgttgttttttattctatttacaggatgatttttaaactgtcaaatgaagtagtgttaacctcaaataggctaaatgtgaacaaataaaatacagcaaatactc

SEQ ID NO: 48 - DNA, 6496 bp, Homo sapiens
gtgggcgtggtgtgctatagagtgtactgctgctgctgcttggccaacgtttcactgcctggcatcgggggcaccattcctgagtccaaacctttcttctacgtgaacgtggctgacatcgagagcctggaggtagaggtgtcctatgtggcctgcaccacagagaagatattcgaggagaagcgggagctgtatgacgtctacgtggataaccagaatgtgaagacacaccacgaccacctgcagccgctgctgaagatcaacagtgctgacagggagaagtaccgccggctcaacgagcagaggcagatgctgttgtactcccaggaagtagaagaagactacaacccttgtgaagaggacctcttcgtgctgtttttcctagaacaaaacaaccggatatttcagactttgttggaggtgtctgccagtcaagacaaaactctgacagcagagcatgcccggggcatgggcctagacccccaaggagaccggagctttctcctggacctgctggaggcctatggcattgatgtcatgctggttatcgacaacccctgttgcccgtaggaggagccaacaggactgggagccgcttcacgtgggatgtcagcagcccggagttcaccccagggccccagagggcctcattttttattaagttgacacaaaggaatattgtttatactttccaacaaacataatttttgcaatttcctttctgcccttttccctagagataaggtgagatcaccttggttttgtgtcctgccatgttaggatattggaatctgccactttctcccagagctgctggtcctctgggcttggtcatgggagttgtatcactaggagtaggctgagctctggaaacattgggatggactgttcagaaagtctgtgtggtctttgtcccttgatgtatttgagaataagacaaccacctgtcccctgtggccttagatgttcatctgcctaaaggcagaaactagaccagatgatcttttaaggtttttagtagttctaggagtctatagtcttgggatcaaatcccttttcttgttcattagggcaactttatgtcttctctgtttacttgagtagggaccacaaagagggaaaaaaggatgtttctgacaccaaatatgagcttatcttatggtcagaatgaaagaggttgcttatcagtgagctgaaaactaaaattatagaatgaagcctggaaaccttcctcaaagtaacttgatggtggccatgcaatgtaatgttcctctttgtctgaaccttcctcttcttgggatgaattggtgaattgctaagggccaatgctggccttggagcttgcaagcaaattaattttccagtttagtctcttaagggttcaataatgctcttggagtaagttgggtatttttaaaggctgaagtttggactaccggaggatagagcaattgaagttcgagcaggatggagaagccactctaagtctcttcatctggacacgaattctctggaggcattagcagcagcacctctgggtcaacacagatttactggattccaaaatctagcaaggatctgagctggttaactcagagggtggagcatgatgctaacaagacggtttatcattttggacccctcacaaacacacttctctttagcagaggtgacattccttaggctaaataattggatccagggacataacagatttgttgagagaaaatgtggcagtgccttcacccgggacagtggtcaggaagccctgagcatccctgatggatttatccatcctcttctgaagtgctctgctctaggctgggtcctgttgccacctgcctgttctctggttggcttttgcaggagggcagcttacgtgtttgtcaaccagttagaaagccagttcctgtgggtcgagtttaggcctttttggccatagttgagaattttgacttgggatactgggttgttggtgacaaataatgtcttccttttcccccttcccgcctggctcggttatgggaatagccgtcagtgcatccatgtctgtgaccaacacccagccagactaatgtacacagcagggagaaataacattcaaatggtggttcacacatctcatctcaagataagattcttagggttcactgctttattcaaaagtgttttcactgtagctccttcatatggaatatcaaaactgaagaaattcacatgtggaaatgcaaatagacattgattaatcaaggtagcatctttatgtaaatatataaataagtttgggcattgaaatgtaaactgtacagctaatagacttttctcctctgcaatgtgggttgctgtcatttcagtaatgtgtatgtttacaaaagaaaaaaaaatctgtgtttcgaggttgaagcctcaccttttattctcctttacatgcaaccctctcttcttgcctctcaagggttgaggggtcctttctgtcaagtaatggttatttttcgtggtatcctgaggttcagggtgttttaagctgggggtaggtggttagaggcaggagtagaagtgaaaggaaaggtctgattctcctagaggacacaagaagacctcctttttctggaattagggaatctgccggaaggagctgtttgaggcatttctgctctgagccttctatatgcaaacactgcagttttaactgcaagctcagaagtgctggtgtaaacatagcagggtgagaatgaagttcctgttttttcctttgaatggtgagtcagggcttctgggttcccttaactttgtgcttgtctcggtagctttctgtctcacatctccacgtgtccaccctcctgctcatgcagagggccagggtatgggtggccccagaggagaacgtgccagtgaggcagtgccatgtttcaggtcataggggccttgggctcagctgaccccaatgcagaacttctccctttaagagagattccaataaattggtccttccctaccttgccagcttcttcataggaccagaaatcttgtgcagagcctctgcttggctgaacagcgtgtgctttatctcttcagttacctttgccactgttgagcatcctcagagtatgtcttgcctgggctatgaagtggagcctgtggcttcggaaatcacctttcgaagccttgctctatgccagattctgctccccaacatgacagattaacaggcacaacctaggatcctttgctaccagttctctactagggaattccacagtggcagcagaagctaggagccatgtggacctgcttttctgccagtcttgaaatattttctgagaaaccatctgcttttgttcagaagaaagtgctgaacatcgttcacagacttctaggtctgtaagctctttaggggcgggcattatgatgaccaccggcctcctggaggagggttggatacctgtggtgtgacaccttctgccaccatctcctgccgggcctcagccctcgcctgcctgagcaggcctagttctcctgtgaagctgtcagcctgatctcatgccacactgtgaaatgaactatgtgccagtttggaaatgattgctgacctgagatgctggctgggctgccctgttgttcctgaataagtcagaagaagttccaggtgggagtggaattcaggtttggggctcgttggtatccatgcaaaatatgacaaaggcctgttcaagagggcattttcaattctgtaggctcagcagatgatactgcccagcctttgggaaaatgtccagttggcccctggcttaggactctccacaaggagtttgaaatggtagggcttatcccctaccagactaaaagtatggcccaaattatgtgtttagaatttgcttggcctttaaacacgaaccattccctatgcctggtagagaccattccagtatcagtgtcccacctgggacctgtacagtcctcagtaaattatgattgcaatgaattagaaggcttttgccttccatatccatcatccattatagcatctgtgcttccacctggttagggggagggaagctgaaatcattgatgtatcaatagaagtaatttagcttaggaacttgcatctataacttaccttgttttgttccactttaaagtcaagacaagaaagttaagatagcacacaggtgcacatgcttccagatgccacatgtgaacatttgttgatcatgtgactaccgatgacactttagctagaagataaattaaatcttagctaaatcattgtttttccttctggtggctatgaggatgaatttgctctcagtcttgatgcactgaaagcccttcaaacacagtaaaagatgaaatcactcatctttaaactgaggccttcagggaagcttttgtaaaggacagtaatgaattaggctttcagttttaggacatcaaccctccgagaaaaggcagaaacccgagggaccatttatttcccttcgaaactgtatagcccagggaatggattgagatgctttctccagaccctgtataggtcaaccttgcagaggtaaaggaggaggggcaggtggatgaataaaataggataatgctcagcttggcagtggacttgccttagtgtgatgacaggtctaacatgggcaagacaattagaatggggaccaatatgccaggcatgggcttttatctccctagtagatcccaagctagtaggcttggattctgccaaatggccagccctcctgtcttctccccgtaccttgtagttagaccgaggtgagaatcctgctgaccccagtcccatcccctctcatttcaggaaaacccttttgtgattcaggtagggggagaggaggagttaagggctccgtttactcccaagtcatggatttttaatattccatttttatcactaatatacctctcttcctagaagctactggagtattgagtgttgtgggaaaaggctaactgtgaattaagttaatgtttttcttataagaaatggaagtttatttttttattgatattactatgtgatgaactgagtatgcatatactgaaatggaaggaaattttaaaactattattctagaagaaatgggcagttttgtaatttggtggtggctgagaccccatagaagttttactatgtaaataatttggagagtgaataaggagattgtgctatgaaatcctgacagcgctctttaggaggcagacttgacagtcctaggaaggttgacataaaaataccaaccttcagtaaagctctagtacaaaaaagggtaaatgtcatcattcttatttttaggcctctttcttgagagaggtgggagtgggaggtagtgttataactggcactttaatttgtttttggaactagaatttaggggcagttggatgaaattgcaaatttagaaggggaataagaattttctagtgctatataaagaaatgatgatggagacaaaagccttgctttcctctttttagaatttattttcgatttttagcatactgtggggcttttagagctaatatgatctaaattcagaaaatttaattttcatagtaggccaggtgtgaattacttatgtttgctatagaatgcttatttagactaacaataaatttactttgctttctaaggccagtcagcgaatgtggggatgaggcaggatgttttaaatgagccagagatgatccacaaagtgaacagtcgacacagaggtctttgagttggatggttgcaaatatattgacattagagtgaaaactccttcctttgggtaaactaaagaaagataaagtatactaaaaaattttaagatggtgttatacaaaaaaaagtttgggtctaacgtgtccacaaagactgtcaagtgaagaatggtggagattcttggtgtttgagcagccaacctggatgagtgacttcagggacagagcagaggaaagcaaaatgaatttcctttatttacccaaaacttgttgactgaatttttgtataggtccgggaaaataagcctaaacaaatagttgtagccttagaaaaactgttttcccatttctttctgagttagaatcagcatagcctccctgtcgccttaaatgtaaaaatcctattttgattaataccccagcctaagagttatagcaatacgagagactgaatctatttttgtttcgggtctttacctcatagtatgaaattagtaagacactgcatagattttgccctgaatactggtgtgcccaggtatgccgtgctctctctctgtttccagtggtggtaattttaaggcctaaagaaagctggggttaatcctgaagctaaaagtaaatgtttcttgaattgattttgttctgtggtacaaataacatctatgaatatcatatctgtatatatctgaaccaagttgtgtgcagagaggttgatataactatatttacagaaaatgatttttacaattaaagttcacattttaacatg

SEQ ID NO: 49 - DNA, 2432 bp, Homo sapiens
ggcgagtggcgagtggcgagtgtcaggggggcggccggcgggggcggggcggccggaggaggcgttggcagcgggctcggacccacgcggcgccgcggcccgcctggcctgcagcgctcccacccccggcggcggcacgatgccctttgacttcaggaggtttgacatctacaggaaggtgcccaaggaccttacgcagccaacgtacaccggggccattatctccatctgctgctgcctcttcatcctcttcctcttcctctcggagctcaccggatttataacgacagaagttgtgaacgagctctatgtcgatgacccagacaaggacagcggtggcaagatcgacgtcagtctgaacatcagtttacccaatctgcactgcgagttggttgggcttgacattcaggatgagatgggcaggcacgaagtgggccacatcgacaactccatgaagatcccgctgaacaatggggcaggctgccgcttcgaggggcagttcagcatcaacaaggtccccggcaacttccacgtgtccacacacagtgccacagcccagccacagaacccagacatgacgcatgtcatccacaagctctcctttggggacacgctacaggtccagaacatccacggagctttcaatgctctcgggggagcagacagactcacctccaaccccctggcctcccacgactacatcctgaagattgtgcccacggtttatgaggacaagagtggcaagcagcggtactcctaccagtacacggtggccaacaaggaatacgtcgcctacagccacacgggccgcatcatccctgcaatctggttccgctacgacctcagccccatcacggtcaagtacacagagagacggcagccgctgtacagattcatcaccacgatctgtgccatcattggcgggaccttcaccgtcgccggcatcctggactcatgcatcttcacagcctctgaggcctggaagaagatccagctgggcaagatgcattgacgccacacccagcctaatggccgaggaccctgggcatcgccagccttgcctccagtgccctgtctcctttggccctcaatctggtcccaaatctggctgtgtcccaaagggtgtgtgggaagtggggggaaagtagaggatggctcgatgttttgcagctacctcttttccccgtgtttctttttagacaaattacactgcctgaagttgcagttcccctttccctggggagccccaagaacagagtcaggcaaggggtggggagtccagggatcttggggacccctcctaggagagctgcagtctcttccctcaggggaacatcccagaatgcatatcgatcagctctcagccaggcttcgacaatctcgcagcccccactaggtggacacattaatgatttggtttctcccctgggcagccaacctgccccagaggcaccagacctgggctttcagctttgggaccaggctgcccaaaggtactcctttatacacccggcaccttccacgaaagatggtacttcccaagcaagcccctatgatttgtcactatagatggaaccctgacttctgccccatcccttcctgcccaacctagaacccaggcctcaagtctttaccccacccctttcttgttcttccaagaagcagatgcccagttgctcagcagcagcggtagagacttgaatctgcccaccagtcacaaggcgggtcacagattcctcttcctctcttctcctcgttcctctgaaccctccaccaatgtgcctcagcctgtgtgctgtgtggcaacagcattctggttcccactgccaagatctcccaccactctgctgggatctgcagtggcagggagtgggggttgtgtaaaggggaagtcatcttttgagatccagatagacatggtttgtgcacttacgtccagatgggaagcatccttcctgcaaccctaaaataatcatgcagcctctcagacggacgccatcggtcccaaggccttaggtggaggaagcaaagcaggccaggcctgtcctgtccgtggacctctaccttctggactccctacgggtgcagagcacttgggtttctctacagccatcgtggcccacttgacactgtgctcctccatcagctggtcacatgccaacacgttcccagcccctgaggcagctccagggtgccccacctgctcctgaggtgggtccctaccctgctgctcctcttcatcctttcccttttgtcctgaaagggaggagcaatggtccaggcattaattccacccagggaattttagctatgccctcatgtcccagggagagagccacacgcctgttttccatttatagcaagattgtttgcatacttttgtaatgaaggggagtgtccagtggaaggatttttaaaattatcttatggat

SEQ ID NO: 50 - DNA, 5380 bp, Homo sapiens
taatttttttttttccaaagagatgggatcttgctacattgcccaggtgggtctcgaactcctggcctcaagcaatcctcttgccatggcctcccaaagcactgggattacaggcataagccattgcacccagcccttgaatttttgaaaattaggctctttaacacctgcttggacttcaaagaacgaaggtgagtacttacacaataaccaaacagtgcattccttggaaattccaaacctagatctcttgttacatgcttgccaagcttgtcctgaacgttcctaagtgcagcaggaaagaagtggctcagcttgtgctgtgtgtcccctgagtcttgacctgtgactaataactgtttcctttgtgtgcaggggttctctatctccagtatggagatgaaaccaagcagctcaggatgccgaatgaaatcacaagtgcagacacaatccgtgctctcttcgtaagtgcctttccacagcagctcaccatgaaaatgctggaatcgcccagtgtcgccatttacatcaaagatgaaagcagaaatgtctattatgaattaaatgatgtaaggaacattcaagacagatcactcctcaaagtgtacaacaaggatcctgcacatgcgtttaatcacacaccaaaaactatgaatggagacatgaggatgcagagagaacttgtttatgcaagaggagatggccctggggcccctcgccccggatctactgctcatccaccccatgcgattccaaattccccaccgtctactccagtgccccattccatgcccccctccccgtccagaattccttatgggggcacccgctccatggttgttcctggcaatgccaccatccccagggacagaatctccagcctgccagtctccagacccatctctccaagcccaagcgccattttagaaagaagagatgtcaagcctgatgaagacatgagtggcaaaaacattgcaatgtacagaaatgagggtttctatgctgatccttacctttatcacgagggacggatgagcatagcctcatcccatggtggacacccactggatgtccccgaccacatcattgcatatcaccgcaccgccatccggtcagcgagtgcttattgtaacccctcaatgcaagcggaaatgcatatggaacaatcactgtacagacagaaatcaaggaaatatccggatagccatttgcctacactgggctccaaaacaccccctgcctctcctcacagagtcagtgacctgaggatgatagacatgcacgctcactataatgcccacggcccccctcacaccatgcagccagaccgggcctctccgagccgccaggcctttaaaaaggagccaggcaccttggtgtatatagaaaagccacggagcgctgcaggattatccagccttgtagacctcggccctcctctaatggagaagcaagtttttgcctacagcacggcgacaatacccaaagacagagagaccagagagaggatgcaagccatggagaaacagattgccagtttaactggccttgttcagtctgcgctttttaaagggcccattacaagttatagcaaagatgcgtctagcgagaaaatgatgaaaaccacagccaacaggaaccacacagatagtgcaggaacgccccatgtgtctggtgggaagatgctcagtgctctggagtccacggtgcctcccagccagcctccacctgtgggcacctcagccatccacatgagcctgcttgagatgaggcggagcgtggcggaactcaggctccagctccagcagatgcggcagctccagctgcagaaccaggagttgctgagggcaatgatgaagaaggccgagctggaaatcagtggcaaagtgatggaaacaatgaagagactggaggatcccgtgcagcgacagcgcgtcctagtggagcaagagagacaaaaatatcttcatgaggaagagaagatcgtcaagaagttgtgcgagttggaagactttgttgaagacttgaagaaggactccacggcagccagccgattggttactctgaaagacgtggaagacggggctttcctcctgcgtcaagtgggagaggctgtagctaccctgaaaggagaatttccaaccttacaaaacaagatgcgagccatcctgcgcatagaagtggaggccgtgcggtttctgaaggaggagccacacaagctggacagtctcctgaagcgtgtgcgcagcatgacagacgtcctgaccatgctgcggagacatgtcactgatgggctcctgaaaggcacggacgcagcccaagccgcacagtacatggctatggaaaaggccacagccgcagaagtcctgaagagtcaggaggaggcagcccacacctccggccagcccttccacagcacaggtgcccctggcgatgcgaagtcggaagtggtgcctttgtccggcatgatggttcgccacgcgcagagctcccctgtggtcatccagccctcccagcactccgtggccctgctgaaccctgctcagaacttgcctcacgtggccagctccccagccgtcccccaggaagcaacctccactctgcagatgtcgcaggctccgcagtccccacagatacccatgaatgggtctgccatgcagagcttgttcattgaagaaatccacagtgtgagtgccaagaacagggcagtgtctatcgagaaagcagaaaagaaatgggaggaaaaaaggcaaaatctggatcactataatgggaaagagtttgagaagctcctagaagaagctcaggccaatatcatgaagtcaataccaaatctggagatgccgccagccacaggcccactgccaaggggagatgccccagtggacaaggtggaactttcagaagattctccaaattcggaacaggacttggaaaagctggggggaaagtcgccccctcctcctccgccacctcctcgtcgaagctacctgccaggatcgggactcaccaccacgaggtcaggcgatgtggtctacaccggcagaaaggagaacatcaccgctaaggcaagcagtgaagatgctggaccaagcccacagaccagagctacaaaatatccagcagaggagcctgcttcagcctggaccccatccccaccgcctgtcaccacctcctcctcaaaggatgaggaggaagaagaagaagaaggagacaaaataatggcagaactccagggctccagcggggccccacagacgagcaggatgcctgtccccatgagtgccaagaacagacccggaaccctggacaaacccggcaagcagtccaaactgcaggatccccgccaatatcgtcaggctaatggaagtgctaagaaatctggtggggactttaagcctacttccccctccttacctgcttctaagattccagccctttctcccagctctgggaaaagcagttctctgccctcttctagtggtgacagctctaacctccctaatccacctgctactaaaccatcgattgcttctaaccctctcagcccccaaacaggaccacctgctcactctgcctccctcatcccttctgtctctaatggctctttgaagtttcagagcctcactcatacaggtaaaggtcaccatctttcattctcaccgcagagtcaaaatggccgagcaccccctcctttgtcattttcctcctcccctccttctcctgcctcctccgtctcactgaatcaaggtgccaagggcaccaggaccatccatactcccagcctcaccagctacaaggcacagaatggaagttcaagcaaagccaccccatccacagcaaaagaaacctcttaaaggtcaaatcctattaggcacaagtcggagttacatttaaaaaaaattaacagtctacaacaactgttttcacaagagaatgtaacatattgctgtatcgtttgaggcttaatgctaaatatgtgctaaatactggattaatagatttcagtaaagctcgttcgttttgtttggttttctttttacctagttgctatagtgtctacagtctatactcaatacctataaaatgcagtaagcatgtgttacagaaagaggttctggtgggagagaaaggtgcgtgtgagacaggagaattgtcttaagcatataaaacatgtatgattccagaattttagtatgttttgtataaaactatttttcattacggagactagaagtgaacagagaattacacaagtgtgactatacaaattgtaaaacagatactataatatttccttttattttagtgttatttagctttattacagatttctatttttgtcaaaacttcatggttcctttcaagatcttttttgccaaaacattttgatactatagcattgtacatttgaaagtagtgttctagactataaaaccaatgaacttctacatgagccctacagacaggcatgtgtagaaggcaatttatcaaacctattgcactgccatgaaaagtgtgtataataatttgctagcccaagcaagctagttttctttgcttgcttcttttctttcttttttccttcctttttttttttttttttcttttttaacatgttgagattctctagttgttttctttggcgtatctaaccccttcttttgttttctgagacctggtaacccacgctcttgcattgtggattttaaaatgtatactctgtacggttctgtaaaccgaaaaacttttgtaaatataaatatacatagacataaaaatactgtatgtgacagcacatagagtagttttcccacaccaaagttaatttttatgcatgctttaaaagtatatatcgggaccggcagaaatggaagtatccatacatttttaaaaagcaacaagtttgcacagctagagtgtttttgtaaataaatgtatttgtataacacagtcatgtaatatacagaactataagcagagactttgcaaaactaaataaagggctgcatgcttattattttttgtaccttgtcactataactacttcctagtcaaagaacgaaatgtaactgttaccgagttaaatgtttttccgctttgagggatgtaaccacatccactcagaggacactacttttctgaaagctctggggtgactaatgatgagttcctaataaattaattgcaagtgtggtgccttggatgtggcctgttggctcgctttcttctctgtggcttatcaaggtgtagatgacagaaagcaaacctggatacagagtttccaccctcagttcctggaggggctcttattattttctctctttttaaaaaacttccagtagaagtaaagtggaaataaaatgtctttatcacttgg

SEQ ID NO: 51 - DNA, 5567 bp, Homo sapiens
atggtggaacacgctgcccacaaacatggaaacgaccgttctcagtgggatcaacttcgagtacaagggcatgacaggctgggaggtggctggtgatcacatttacacagctgctggagcctcagacaatgacttcatgattctcactctggttgtgccaggatttagacctccgcagtcggtgatggcagacacagagaataaagaggtggccagaatcacatttgtctttgagaccctctgttctgtgaactgtgagctctacttcatggtgggtgtgaattctaggaccaacactcctgtggagacgtggaaaggttccaaaggcaaacagtcctatacctacatcattgaggagaacactaccacgagcttcacctgggccttccagaggaccacttttcatgaggcaagcaggaagtacaccaatgacgttgccaagatctactccatcaatgtcaccaatgttatgaatggcgtggcctcctactgccgtccctgtgccctagaagcctctgatgtgggctcctcctgcacctcttgtcctgctggttactatattgaccgagattcaggaacctgccactcctgcccccctaacacaattctgaaagcccaccagccttatggtgtccaggcctgtgtgccctgtggtccagggaccaagaacaacaagatccactctctgtgctacaatgattgcaccttctcacgcaacactccaaccaggactttcaactacaacttctccgctttggcaaacaccgtcactcttgctggagggccaagcttcacttccaaagggttgaaatacttccatcactttaccctcagtctctgtggaaaccagggtaggaaaatgtctgtgtgcaccgacaatgtcactgacctccggattcctgagggtgagtcagggttctccaaatctatcacagcctacgtctgccaggcagtcatcatccccccagaggtgacaggctacaaggccggggtttcctcacagcctgtcagccttgctgatcgacttattggggtgacaacagatatgactctggatggaatcacctccccagctgaacttttccacctggagtccttgggaataccggacgtgatcttcttttataggtccaatgatgtgacccagtcctgcagttctgggagatcaaccaccatccgcgtcaggtgcagtccacagaaaactgtccctggaagtttgctgctgccaggaacgtgctcagatgggacctgtgatggctgcaacttccacttcctgtgggagagcgcggctgcttgcccgctctgctcagtggctgactaccatgctatcgtcagcagctgtgtggctgggatccagaagactacttacgtgtggcgagaacccaagctatgctctggtggcatttctctgcctgagcagagagtcaccatctgcaaaaccatagatttctggctgaaagtgggcatctctgcaggcacctgtactgccatcctgctcaccgtcttgacctgctacttttggaaaaagaatcaaaaactagagtacaagtactccaagctggtgatgaatgctactctcaaggactgtgacctgccagcagctgacagctgcgccatcatggaaggcgaggatgtagaggacgacctcatctttaccagcaagaagtcactctttgggaagatcaaatcatttacctccaagcagccagctcctgtcaccatctctctttcagaggactcctgatggatttgactcagtgccgctgaagacatcctcaggaggcccagacatggacctgtgagaggcactgcctgcctcacctgcctcctcaccttgcatagcacctttgcaagcctgcggcgatttgggtgccagcatcctgcaacacccactgctggaaatctcttcattgtggccttatcagatgtttgaatttcagatctttttttatagagtacccaaaccctcctttctgcttgcctcaaacctgccaaatatacccacactttgtttgtaaattatgcccttgcttgtatcttgtttcccaaaatggcccatccgccagagccatagcttcgtctgctcataattcttatagctttggaatgaaaatatttctatcttcttaagtatagaaactatttcctctgtcctctaacttaagggcagaaacagctgggagttttcctcgcatgccctcagctcatgatctcttcaggagagaggctgggtgaggagggtgtcggggttccctggtggataatcttcatagcagcctggatccatttcccctggataaccagctcaaagggagtgaaaatggtagtctgagggcaaggggagcaaggcctgggtaagaaaagccttgaaaagcataaaaagaggccgggcgcggtggctcacgcctgtaatcccagcactttgggaggccgaggcgggcagatcatgaggtcgggagattgagaccatcctggctaacacggtgaagccccgtctctactggaaatacaaaaaattagccgggcgtggtggcgggtgcctgtggtcccagctactcgggaggctgaggcgggagaatagcgtgggcctggaaggcggagcttgcagtgagccgagatcgcgccactgcactccatccagcctgggtgacagagtgagactctgcctcaaaaaaaaaaaaaaaaaagaaaagcacaaagagaggcaacaaggaatgtttttgtttttgagacaggctctcactctgtcacctaggctggagtgcagtggcgtaatcactgttcagtgcagcctcaagctcttgggctcaggctatcctcccatctcagcctctcaagtagctgggactacgagtgtgcaccaccaggctcactaatttttgtgttttttgtagacacggggtttcaccgtgttgcccaggctggtctccaactcctgggctcaagtgatctgtccgcctcggcctcccaaactgctgggattacaggcataagccactgcactcagccttttatttgttttttaaaccacgtagctcattgccttctcttaagtaaatgatagatattctcactgaagccaaaggaataagttcatcaagaaaatgcccaaagccctggtggatacatcctccctatcttttttttaaaccttccactatcactctatgacactgaaaagaaccaggtaagccccaaacccagatgttccagccttatcctctattgggtttacccacagacatagcaaaccctgtcagtgaggaaaattccccatccttgagtgcccccgtcctagaagtttgggccatattatggaacaggggtctcttatttgaaaagagcacaaggaggccaagattttaatggggcactttaggggatacagcccacaatggcatgggcctgaggtggccgtgatgtctgcttctaagcttaacgcatctgctcaggcacagaataaacgtctaggctggccaaaaaaggaactgaatcccaggcccatacgccagcaccagaatcaaaccagtcttcaaggaaggaaggctaggagagtttaacaagattttcactgggcccagcatggtggctcacacctgtaatcccaaggcagaatggtggcttgagctcaggagttcaagaccagcctgggcaacacagtgagaccctgtctctaaaaaatttaaaaataaacaaggtgttcaccaagctgggatacttctcactattaagcccctatctttctctttttttcattctcaattgctttgtgtgataaaaaactaaagagacttctggtccaatttctggcaacatcccttctgaaaggtgagtagagtgggtgtcttctatgcccattttccccaattttacacaaactattatcaatgaacttttaagtacctagaatgggtaaaaccagagcaagactttaaattaccttcttctttcttctactggcagttctgcctccatcactatcaggctagggtgaccttcccttggtcaagccccaattgcccatgatttgtgcctgtgccctttctccagtgaccatttggtgaccagatggtagatatagaaaggggatggcatttgcaagtgactagtctgccacaaaatgctcatctgattagccactgctgccctggcaatggctttgtaagagtcaatgagaactagagccaggctgtggtccctggccatcaacagtgttggtgacggcagggagtccctttggtttaataaatccagtttttctttgggtatccaaattctcccctccttttgtaggagtcaggctctcagaacctgtgtccatgttggaacttcccccagtgtggatgcagatacgcagctcctgagctccagcctaaagtcttctgtagcctcagcaatacttgggcacctgctgtctcactgaatagctttcttttgtgacaaaggccacagacagcccttagactattccggaaacagtaggaaaaattacatatgtctttgacttctttattctgactccactgattttagccataatactttaaggagctactttttactaccccttaccgtgctgacttctgcaggtctgccctgtgacctgtcaggaactcctgagttacgctactggggtcacctgttgctcccctagcaagttaggcatgtcatatatttttaacagctttattgagatataattcacatattatacaattcacctttaaaacatacgattcaatggttttcagcaaactcacagagttgtccgcccacttgagagcaaacacatgttcaattttcttttcctttttttttttgagacagagtcagctttgtcgcccaggctggagtgcagtgccatgatcttggctcactgcagcctccccatcctgggttcaagtgatccttctgcttcagcctccccagtagctgggattacaggcatgcgccaccacgcctagctaatttttgtgtttttagtagagatggggtttcaccgtgttggccaggctggtctcaaactcctggactcaagtgatccacccacctcggcctcccaaagtgctgggattgcaggtgtgagccaccgtgcctggcctacgtgttcaattttctatgaacaaaggctttagtccttgacccagggctaaagtggtctgtccaagctgttgttggtagagggagtatgataaaatgtttaaatctcatttggttaccttgagtcctggaacacgcagtaactgtcatgctatagtcatcatctgtatttggctgggaatacaaatgaagattgtggtgtattcaagcagtagggtttttgcttttgtttttgttttagtgccaacaaaacttttttttgtctgactacattaaagataagactgactatatttatacaacagaaactttgtaatagattttttcagctttgtgaaatcgaattttttttcatcagggctggttggatttcctttttaccctgtaatccaagcgttaatagtttgttagaagatgggttattgcatgtcacttttttttttttgtaaaataaaaacataccttac

SEQ ID NO: 52 - DNA, 2782 bp, Homo sapiens
gcggccgcggcggggcggcgcgggaaccgggccccggggggagtcggccgggctgctgctgctgctgctccaggtgctgccgcccggggctacggcagggccgggacgccggggcacgcggggcgctggcggcggcggcgtctgctggcccggcgcggccccagcctttccccgggacgcgcggctgctgctgctcctgccgccgctgccgccactgtcgccgccgccgccgagctccgcgcccgcagcctccgcctcccggatggacgctctgccccgcagcgggctgaacctgaaggaggagccgctgctgcccgccggcctgggctcagtgcgctcctggatgcagggcgcgggcatcctggacgccagcaccgcggcgcagagtggcgtgggtctggcacgagcacattttgagaagcagcctccctccaacctcaggaaatccaacttcttccacttcgtgctggccatgtacgaccggcaggggcagcccgtggaggtggagcgcacagccttcatcgacttcgtggaaaaggaccgagagcccggggcggaaaagactaacaatgggatccattaccgcctccggctggtgtataacaatggactgcggacagagcaagacctctacgtgcgtctcatcgactccatgtccaaacaggccatcatctatgaggggcaggacaagaaccccgaaatgtgccgagtgctgctcacccatgagatcatgtgcagccggtgctgtgaccggaagagctgtggcaaccggaatgagacgccctcagaccccgtcatcattgacaggttcttcctcaagttcttcctcaaatgcaaccagaactgcctgaagaatgcggggaatcccagagacatgcgccgcttccaggtggtggtgtccacgacggtgagcgtggacggacacgtgctggccgtgtccgacaacatgtttgtgcacaacaactccaagcatggccgcagggcgcgccgcctggacccctccgaagctgccaccccctgcatcaaggccatcagccccggggagggctggaccacgggcggcgccaccgtcattgtcatcggcgacaacttcttcgacgggttgcaggtcgtgttcggaaacgtgctcgtgtggagcgagctcatcacgccccacgccatccgggtgcagacgcccccgcggcacatccccggggtggtggaggtgaccctctcctacaagtccaagcagttttgcaagggatgccccggccgctttgtctacacagctctgaacgagcccaccattgactacggattccagaggctacagaaagtcattcccagacaccccggagaccccgagaggctgcccaaggaagtgctgctgaagcgggcggccgacttggcagaagccctgtacggagtgcccggcagtaaccaggagctgctcctgaagcgcgcggcggacgtggccgaggctctgtacagcaccccccgcgcacccgggccgctcgcacccctggccccgagccacccacactccgccgtcgtgggcatcaacgccttcagcagcccgctggccatcgccgtcggggacgccaccccggggcccgagccgggctacgcgcgcagctgcagcagcgcgtccccccgcgggttcgcgcccagccccggctcgcagcagagcggctacggcggcggcctcggagctggcctgggcggctacggcgcgccgggcgtggccggcctcggcgtgcctgggtcccccagcttcctcaatggctccaccgccacctcgcccttcgccaaggagcgccttcgcccccgtgctgcgccccccaagctccccaccccaggcctgccccagagcccacggagaggggcttccagaccagtcttttgaggattctgacaagttccactctccagcccgggggcttcagggcctggcatactcctaattacggtctgcagctgttcccatggagcccggactggaggtccctctgggattcacagccacaccccggatggtggcacagacagatgcagggccagggccatgggcggacctcaacccgtgagctgaacggggagaggccttcaccccatgctcaagcctccccgctagcagccccacaggcttctctcgcctccctgtcttggggtagtcagaagccccagcactgtgcagatgctcttggcaggacagcatcgcagggaggtgctgggattctgggcctcactgtctgggtcttggttcctctgaaagagatggatcttgtgcagaccagggttgttgagtgaggggagcgtgggatggggaccgtgggaaagaggacagctcagggagaagtgacctggaaaggtcctgtttgcatctgacccatctcaactggcccagcatcccaacttctctgcagcgaaagggtggcgccccgcagcctcgggaggcctgcccaggctcccgtggagcttccaacagctgcttggccccgcagctgcccccacttcctttgagacctgcactctcatgcttgccgcatcatgcctccctgtgggggctttgggcatggaggaggcagaagagggggtgccaggcctcctgtatttggggtcttcccccagtggatgtctcatggactctggccccacacactcacaatgactctggctggccccacgcagcgggcccagccgccccccaggtggcctcacattctgctctgctaagtttggagaaaacagaacaataaaccagatgcaggtggtgcccgcccggcctctcacctgcctcctt

SEQ ID NO: 53 - DNA, 1316 bp, Homo sapiens
aaatagaatcaacttgggttatatttgtcatttactttgttctgttagattttttcagttgtttttggaaaaattctagaaatcaggatgaaaaatgcagcttttccagggttgctggactgggggttttatttgggcctccttattataatttgtcactacttataaaaaacattctgttgcaaacagtggtgttgcattgaattgaactttggcaatgagaacacagcacacagctcccttttcaaaaagggtctcaaccccagtgtgtatttttgtacatcaacatttagaatacttatggcagataagtaaggcatgtcactgtgtccttcagtaacctctctcagtaactggtttctttatccctaacatgaattcatttctcctttgaagtcatttattattttataaattgagaacaaccacaccaccaaatgtcacaccttcttataaagtgtgaacaaggaaggtcatgtttttgtgggtattttgtcagacttagaggtttcatttcagggcatagtcaaaggcatcatcctcccaactacccacttgattatgtatttcagatccctccgtgggggccttcttctgacagagaattctttgaggtacgcagtagtgcttttgtcagcacagactgctaatctacatcttgctgcgttctgtttgctgaggttgggcttattcatttaacacgtaccaaccattatccagaggcaccatggagagttagtcatggaataaagcactgtccttgcagatgaaaaaagtctccagagcagacttctgacaggaaaggtttagatgctggagagttgaagaggtgtaagaagagatcgtgccctcatttttcacttatttttttggttattcatttataataaaaggttggcattgatatggtacaacctgcaaattacttgcagttctgagtttcagataaaacattataaaacattaaattcaatacatactgctcctttgaaatttgggtaaaaaattgtacaaccgtatatatagtcatttttgtattttttctatgttgtgaaaaccaaaattgtaattttataagtctttgattcactaaaattatataatttaaatgtattttttgtatatttagaaataaggagtccagagactacgcttaactttctatgcatgcatttgaaagctgtttttacctgataatgtagtaataagttgtattcataaaatactgatctgtgttgcatttcaaaataaactggtgtgtgctctgcctggatttgaaaaaaaaaaaaaaaaaaaaaaaaaaaaaaaaaaaaaaa

SEQ ID NO: 54 - DNA, 1380 bp, Homo sapiens
gtcaaaggatatttatttataggcctttttttttttaatatagaatctgaggctgtttgggctttgacttaaatttccatcaggcctctctccagcaggtaatccctctccttccgctgggtcccctggggaggtgtgaactcaagggcctagccccaaaacactttttctgcttttcttaatccttttccagtcccctctttttttataaacgttggcagtttgatgtttctgtttcggcataacgtaatccatttcactgtagcctaaactccagtccgaggttggatattgttcaaatgagcagggcccgagctggaagcgcaaggcagccgccgccgtgccgctcctcccttgccctcaggccaggtccctgctggaagcggctgcatcttcctgtcagccctggtttccatggtgactggcgtcacgcagccacccgagtatggctgaccttcctgcagagagaggagccgcagtcttttgcttgtggaaggagacgctgggctgtgcggtgcggagggtgatgaggatgtctggtgacagccgtgcggacaccactcctctctgcagcactgcctcccagcgccagggtcgcgggcacatcccactgagagcgggggtcctgccccatcttagagtcaaaggcagaggggcttccaggccctggatggggtattttggtgtcacctgaagtccctctgacatcaccttgtttcatcattttttatgacagaattagaaacccatccttcaagcacaataatcatcacagacttgagtttgcttcctaaagcaaaggctccgggtttgtttggaaaatttttttgatttctgaaatgaattgatttttatatttggggcatctctatagaaagtgaccaccaaggccagtaagtacgggaaaaaatgtttactaacttcctcagagattcgtgatacgcgtttctccactgacagacatttaaaaacaaccttcagctccgtttcaatcaatcacctcgacttgttttttagcatggacactgccagcaggacagacagggatggagtaaaccgaagtcaatttcagggctcttggcgtgttggacacagaagaaatcctagtgcagcctttggtagctaacagtcactgattttataattggagaatgcgtaaagattcatttttcaaggagaagagcctgcaaatggccaatgaaggaggtaaataaactaagatattccgagggaagggacccaggccacctcccttccgcaggtctgcagatgaagggttttttgaatgaaatgccactgtgcattttcagaaaaaaaaatctctgataaacagactttgaatggaaaaaaaaaaaaaaaaaaaaaaaaaaaaaaaaaaaa

SEQ ID NO: 55 - DNA, 1722 bp, Homo sapiens
ggggaaaagagctaggaaagagctgcaaagcagtgtgggctttttccctttttttgctccttttcattacccctcctccgttttcacccttctccggacttcgcgtagaacctgcgaatttcgaagaggaggtggcaaagtgggagaaaagaggtgttagggtttggggtttttttgtttttgtttttgttttttaatttcttgatttcaacattttctcccaccctctcggctgcagccaacgcctcttacctgttctgcggcgccgcgcaccgctggcagctgagggttagaaagcggggtgtattttagattttaagcaaaaattttaaagataaatccatttttctctcccacccccaacgccatctccactgcatccgatctcattatttcggtggttgcttgggggtgaacaattttgtggctttttttcccctataattctgacccgctcaggcttgagggtttctccggcctccgctcactgcgtgcacctggcgctgccctgcttcccccaacctgttgcaaggctttaattcttgcaactgggacctgctcgcaggcaccccagccctccacctctctctacatttttgcaagtgtctgggggagggcacctgctctacctgccagaaattttaaaacaaaaacaaaaacaaaaaaatctccgggggccctcttggcccctttatccctgcactctcgctctcctgccccaccccgaggtaaagggggcgactaagagaagatggtgttgctcaccgcggtcctcctgctgctggccgcctatgcggggccggcccagagcctgggctccttcgtgcactgcgagccctgcgacgagaaagccctctccatgtgcccccccagccccctgggctgcgagctggtcaaggagccgggctgcggctgctgcatgacctgcgccctggccgaggggcagtcgtgcggcgtctacaccgagcgctgcgcccaggggctgcgctgcctcccccggcaggacgaggagaagccgctgcacgccctgctgcacggccgcggggtttgcctcaacgaaaagagctaccgcgagcaagtcaagatcgagagagactcccgtgagcacgaggagcccaccacctctgagatggccgaggagacctactcccccaagatcttccggcccaaacacacccgcatctccgagctgaaggctgaagcagtgaagaaggaccgcagaaagaagctgacccagtccaagtttgtcgggggagccgagaacactgcccacccccggatcatctctgcacctgagatgagacaggagtctgagcagggcccctgccgcagacacatggaggcttccctgcaggagctcaaagccagcccacgcatggtgccccgtgctgtgtacctgcccaattgtgaccgcaaaggattctacaagagaaagcagtgcaaaccttcccgtggccgcaagcgtggcatctgctggtgcgtggacaagtacgggatgaagctgccaggcatggagtacgttgacggggactttcagtgccacaccttcgacagcagcaacgttgagtgatgcgtccccccccaacctttccctcaccccctcccacccccagccccgactccagccagcgcctccctccaccccaggacgccactcatttcatctcatttaagggaaaaatatatatctatctatttgaggaaaaaaaaaaaaaaaaaaaa

SEQ ID NO: 56 - DNA, 1912 bp, Homo sapiens
ccggcggctgttgtcgggcctccagcgggcggggccgttggcggagcagagcggaggcgcagccgggcggagggcccacgagggctcagccttcccggtcagcggtggtgacggtatcccagagtgccagagaaccgttgcttttccgagttgctcttcttccaggctccgttggtggtcggcatggcccgtggaaatcaacgagaacttgcccgccagaaaaacatgaagaaaacccaggaaattagcaagggaaagaggaaagaggatagcttgactgcctctcagagaaagcagagttctggaggccagaaatctgagagcaagatgtcagctgggccacacctccctctgaaggctccaagggagaatccttgctttcctcttccagctgctggtggctccaggtattacttggcttatggcagcataactcctatctctgcctttgtctttgtggtcttcttttctgtcttcttcccttctttttatgaggacttttgctgttggatttaggttccattctaacctaggatgatctcatttggaaatccttaatttcatctacaaaaactgttttcccaaataggtcacattcacgcatatcagatggacagatgtatcattttggggtccaccattcaacccactacaaggagttttttaaacaaaaataggaaacttagatgtaacttagcactttttttttttttttttgagatggagtctcactctgtcaccagactggagtgcagtggcgccatctcagctccatgcaacctctgcctcctgggttcaagcagttctcttgcctcagcctcctgggtagctgggattacaggcacgcgctgccacacccaggtaatttatttattttttttttgagacagagtctcgcactgttgcccaggctggactgcagtggcgtgatctctgctcactgcaacctccgcctcccgggttcaagcgattctccagcctcagcttcctgagtagatgggattacaggcgcctgccaccacgcccagctaatttttttgtattcttagtagagatggggtttcaccatgttggccaggctggtctccatctcctgacctcgtgattcacccgcctcggcctcccaaagtgctgggattacaggcgtgagtcacagcccccggccataatttagcactttaaaaaataatagccatgttgggccaggcgtggtggctcatgcctgtaatctgagcactttgggagaccaaggcgggtagatcccttgtgcccaggagttcaagaccagcctgggcaacatggcgaaaccccatttctactaaaaatacaaaaattagctggggcgaggggataggccgagttccgggtgtaagggggccattagggagagcagagcgaggcagctgatcttccggattgggggccttgcccggaagctggacctcacggagatgaaacggaagatgcacgaggatatgatctccatacagaactttctcatctacgtggccctgctgcgagtcactccatttatcttaaagaaattggacagcatatgaagattggacatcacatgtgaatgcatgatatgaagagcctggttacagtttctactgttctctgcaagtaaataggcccagaaaggtataagagactctttgaatggacataaaaattctgcttgttaagaacaagttgagctctggtaactgatcttaatagctaaaatataaaaatatttgggaagtctgaaatgaggtctcctggccctggtgtgcccttaatgcctgtgacagttggcctctgtgaatattggtataattgtaaataatgtcaaactccattttctagcaagtattaataattaagggaagtatgtctgaaatggcaaaaaaaaaaaaaaaaaaaaaaa

SEQ ID NO: 57 - DNA, 1780 bp, Homo sapiens
gcagtagaggcgcggggtgcggagctagggaggccgagagccatggcggcgctattggcggcggcggcagtgcgagcccggatcctgcaggtttcttccaaggtgaaatccagtcccacctggtattcagcatcttccttctcttcttcagtgccaactgtaaagctcttcattggtgggaaattcgttgaatccaaaagtgacaaatggatcgatatccacaacccagccaccaatgaggtcattggtcgggtccctcaggccaccaaggcagaaatggatgcagccattgcttcctgcaaacgtgcttttcctgcatgggcagacacttcagtattaagccgccagcaggtcttgctccgctatcaacaacttattaaagaaaacttgaaagaaattgccaagttaatcacattggaacaagggaagaccctagctgatgctgaaggagatgtatttcgaggccttcaggtggttgagcatgcctgtagtgtgacatccctcatgatgggagagaccatgccatccatcaccaaagacatggacctttattcctaccgtctgcctctgggagtgtgtgcaggcattgctccattcaattttcctgccatgatccccctttggatgtttcccatggccatggtgtgtggaaataccttcctaatgaaaccatctgagcgagtccctggagcaactatgcttcttgctaagttgctccaggattctggtgcccctgatggaacattaaacatcatccatggacagcatgaagctgtaaattttatttgcgatcatccggacatcaaagcaatcagctttgtgggatccaacaaggcaggagagtatatcttcgagagaggatcaagacatggcaagagggttcaagccaatatgggagccaagaaccatggggtagtcatgccagatgccaataaggaaaataccctgaaccagctggttggggcagcatttggagctgctggtcagcgctgcatggctctttcaacagcagtccttgtgggagaagccaagaagtggctgccagagctggtggagcatgccaaaaacctgagagtcaatgcaggagatcagcctggagctgatcttggccctctgatcactccccaggccaaagagcgagtctgtaatctgattgatagtggaacaaaggagggagcttccatccttcttgatggacgaaaaattaaagtgaaaggctatgaaaatggcaactttgttggaccaaccatcatctcgaatgtcaagccaaatatgacctgttacaaagaggagatttttggtccagttcttgtggttctggagacagaaacattggatgaagccatccagattgtaaataacaacccatatggaaatggaactgccatcttcaccaccaatggagccactgctcggaaatatgcccacttggtggatgttggacaggtgggagtgaatgtccccattccagtgcctttgccaatgttctcattcaccggctctcgatcctccttcaggggagacaccaatttctatggcaaacagggcatccaattctacactcagttaaagaccattacttctcagtggaaagaagaagatgctactctttcctcacctgctgttgtcatgcctaccatgggccgttagaaacaagtttgtttaagactgactccatcctgagtaatctccctttatttttgaccagcttcatttgtcagctttgctcagatcagatcgatgggattggaatacattgtaactaaaatcttaaaaaaaa

SEQ ID NO: 58 - DNA, 2436 bp, Homo sapiens
gcccaacatggctggagcgcggcggaggtgagccggccgcccgcccgcagacgccccagcctactgcgcccgagtcccgcggccccagtggcgcctcagctctgcggtgccgaggcccaacggctcgatcgctgcccgccgccagcatgttgggcgccccggacgagagctccgtgcgggtggctgtcagaataagaccacagcttgccaaagagaagattgaaggatgccatatttgtacatctgtcacaccaggagagcctcaggtcttcctagggaaagataaggcttttacttttgactatgtatttgacattgactcccagcaagagcagatctacattcaatgtatagaaaaactaattgaaggttgctttgaaggatacaatgctacagtttttgcttatggacaaactggagctggtaaaacatacacaatgggaacaggatttgatgttaacattgttgaggaagaactgggtattatttctcgagctgttaaacacctttttaagagtattgaagaaaaaaaacacatagcaattaaaaatgggcttcctgctccagattttaaagtgaatgcccaattcttagagctctataatgaagaggtccttgacttatttgataccactcgtgatattgatgcaaaaagtaaaaaatcaaatataagaattcatgaagattcaactggagggaatttatactgtgggcgtttaccaacacgtactgtgaatacagaatcagagatgatgcagtgtttgaagttgggtgctttatcccggacaactgccagtacccagatgaatgttcagagctctcgttcacatgccatttttaccattcatgtgtgtcaaaccagagtgtgtccccaaatagatgctgacaatgcaactgataataaaattatttctgaatcagcacagatgaatgaatttgaaaccctgactgcaaagttccattttgttgatctcgcaggatctgaaagactgaagcgtactggagctacaggcgagagggcaaaagaaggcatttctatcaactgtggacttttggcacttggcaatgtaataagtgccttgggagacaagagcaagagggccacacatgtcccctatagagattccaagctaacaagactactacaggattccctcgggggtaatagccaaacaatcatgatagcatgtgtcagcccttcagacagagactttatggaaacgttaaacaccctgaaatacgccaatcgagctagaaatatcaagaataaggtgatggtcaatcaggcagagctagtcagcaaatcaatgcacttcgtagtgaaatcacacgacttcagatggagctcatggagtacaaaaccaggtaaaagaataattgacgaagagggtgtggaaagcatcaatgacatgtttcatgagaatgctatgctacagactgaaaataataacctgcgtgtaagaattaaagccatgcaagagacggttgatgcattgaggtccagaattacacagcttgttagtgatcaggccaaccatgttcttgccagagcaggtgaaggaaatgaggagattagtaatatgattcatagttatataaaagaaatcgaagatctcagggcaaaattattagaaagtgaagcagtgaatgagaaccttcgaaaaaacttgacaagagccacagcaagagcgccatatttcagcggatcatcaactttttctcctaccatactatcctcagacaaagaaaccattgaaattatagacctagcaaaaaaagatttagagaagttgaaaagaaaagaaaagaggaagaaaaaaagtgtggctggtaaagaggataatacagacactgaccaagagaagaaagaagaaaagggtgtttcggaaagagaaacccaatgaattagaagtggaagaaagtcaagaagtgagtgatcatgaggatgaagaagaggaggaggaggaggaggaagatgacattgatgggggtgaaagttctgatgaatcagattctgaatcagatgaaaaagccaattatcaagcagacttggcaaacattacttgtgaaattgcaattaagcaaaagctgattgatgaactagaaaacagccagaaaagactgcagactctgaaaaagcagtatgaagagaagctaatgatgctgcaacataaaattcgggatactcagcttgaaagagaccaggtgcttcaaaacttaggctcggtagaatcttactcagaagaaaaagcaaaaaaagttaggtctgaatatgaaaagaaactccaagccatgaacaaagaactgcagagacttcaagcagctcaaaaagaacatgcaaggttgcttaaaaatcagtctcagtatgaaaagcattgaagaaattgcagcaggatgtgatggaaatgaaaaaaacaaaggttcgcctaatgaaaa

SEQ ID NO: 59 - DNA, 2801 bp, Homo sapiens
gcagtgtctcccggtcgcgcgtggaggtcggtcgctcagagctgctgggcgcagtttctccgcctgctgcttcggcgcggctgtatcggcgagcgagcgagttcccgcgagttctcggtggcgctcccccttcctttcagtctccacggactggcccctcgtccttctacttgaccgctcccgtcttccgccgccttctggcgctttccgttgggccgattcccgcccgcttcctcctgcttcccatcgaagctctagaaatgaatgtttccatctcttcagagatgaaccagattatgatgcatcattatcacagaagaaattcgtgtctatagcttttaaggacttgattacatcattttcaagcctgatagttttggaatcaccattagagcttaagacacacctgccttcatttcaaccacctgtcttcataccctgacgaagtgcaccttttaacactcctttgtccttggattacttaagagttcccagaaatacatttgccaccaacagagtagccaaatttataaggaaaaatgattcccaatggatatttgatgtttgaggatgaaaattttattgagtcttctgttgccaaattaaatgccctgaggaaaagtggccagttctgtgatgttcgacttcaggtctgtggccatgaaatgttagcacacagagcagtgctagcttgctgcagtccctatttatttgaaatctttaatagtgatagtgatcctcatggaatttctcacgttaaatttgatgatctcaatccagaagctgttgaagtcttgttgaattatgcctacactgctcagttgaaagcagataagaattgtaaagatgtttattctgcagcaaaaaagctgaagatggatcgagtaaagcaggtttgtggtgattatttactgtctagaatggatgttaccagctgcatctcttaccgaaattttgcaagttgtatgggagactcccgtttgttgaataaggttgatgcttatattcaggagcatttgttacaaatttctgaagaggaggagtttcttaagcttccaaggctaaagttggaggtaatgcttgaagataatgtttgcttgcccagcaatggcaaattatatacaaaggtaatcaactgggtgcagcgtagcatctgggagaatggagacagtctggaagagctgatggaagaggttcaaaccttgtactactcagctgatcacaagctgcttgatgggaacctactagatggacaggctgaggtgtttggcagtgatgatgaccacattcagtttgtgcagaaaaagccaccacgtgagaatggccataagcagataagtagcagttcaactggatgtctctcttctccaaatgctacagtacaaagccctaagcatgagtggaaaatcgttgcttcagaaaagacttcaaataacacttacttgtgcctggctgtgctggatggtatattctgtgtcatttttcttcatgggagaaacagcccacagagctcaccaacaagtactccaaaactaagtaagagtttaagctttgagatgcaacaagatgagctaatcgaaaagcccatgtctcctatgcagtacgcacgatctggtctgggaacagcagagatgaatggcaaactcatagctgcaggtggctataacagagaggaatgtcttcgaacagtcgaatgctataatccacatacagatcactggtcctttcttgctcccatgagaacaccaagagcccgatttcaaatggctgtactcatgggccagctctatgtggtaggtggatcaaatggccactcagatgacctgagttgtggagagatgtatgattcaaacatagatgactggattcctgttccagaattgagaactaaccgttgtaatgcaggagtgtgtgctctgaatggaaagttatacatcgttggtggctctgatccatatggtcaaaaaggactgaaaaattgtgatgtatttgatcctgtaacaaagttgtggacaagctgtgcccctcttaacattcggagacaccagtctgcagtctgtgagcttggtggttatttgtacataatcggaggtgcagaatcttggaattgtctgaacacagtagaacgatacaatcctgaaaataatacctggactttaattgcacccatgaatgtggctaggcgaggagctggagtggctgttcttaatggaaaactgtttgtatgtggtggctttgatggttctcatgccatcagttgtgtggaaatgtatgatccaactagaaatgaatggaagatgatgggaaatatgacttcaccaaggagcaatgctgggattgcaactgtagggaacaccatttatgcagtgggaggattcgatggcaatgaatttctgaatacggtggaagtctataaccttgagtcaaatgaatggagcccctatacaaagattttccagttttaacaaatttaagaccctctcaaactaacaggcttagtgatgtaattatggttagtagaggtacacttgtgaataaagagggtgggtgggtatagatgttgctaacagcaacacaaagcttttgcatattgcatactattaaacatgctgtacatactttttgggtttatttggaaaggaatgcaaagatgaaggtctgttttgtgtacttttaagactttggttattttactttttggaaaagaataaaccaagaattgattgggcacatcatttcaagaagtccctctcctccacatttgttttgccaatttgcacattaatgactcttcccctcgt

SEQ ID NO: 60 - DNA, 969 bp, Homo sapiens
acggaacagccagtgggaggttccagctgagcgctccccagaggtgagctgatccccagccacagcacacaggaccaggctgcgagaacagcatcatcagcatcatgctattacaatcccaaaccatgggggtttctcacagctttacaccaaagggcatcactatccctcaaagagagaaacctggacacatgtaccaaaacgaagattacctgcagaacgggctgccaacagaaaccaccgttcttgggactgtccagatcctgtgttgcctgttgatttcaagtctgggggccatcttggtttttgctccctacccctcccacttcaatccagcaatttccaccactttgatgtctgggtacccatttttaggagctctgtgttttggcattactggatccctctcaattatctctggaaaacaatcaactaagccctttgacctgagcagcttgacctcaaatgcagtgagttctgttactgcaggagcaggcctcttcctccttgctgacagcatggtagccctgaggactgcctctcaacattgtggctcagaaatggattatctatcctcattgccttattcggagtactattatccaatatatgaaatcaaagattgtctcctgaccagtgtcagtttaacaggtgtcctagtggtgatgctcatcttcactgtgctggagctcttattagctgcatacagttctgtcttttggtggaaacagctctactccaacaaccctgggagttcattttcctcgacccagtcacaagatcatatccaacaggtcaaaaagagttcttcacggtcttggatataagtaactcttggcctcagaggaaggaaaagcaactcaacactcatggtcaagtgtgattagactttcctgaaatctctgccattttagatactgtgaaacaaactaaaaaaaaaaaagcttttgttttgtaaaaaaaaaaaaa

SEQ ID NO: 61 - DNA, 2125 bp, Homo sapiens
tggcgatggcgtacttggcttggagactggcgcggcgttcgtgtccgaggtcactagtttcccggtagttcagctgcacatgaatagaacagcaatgagagccagtcagaaggactttgaaaattcaatgaatcaagtgaaactcttgaaaaaggatccaggaaacgaagtgaagctaaaactctacgcgctatataagcaggccactgaaggaccttgtaacatgcccaaaccaggtgtatttgacttgatcaacaaggccaaatgggacgcatggaatgcccttggcagcctgcccaaggaagctgccaggcagaactatgtggatttggtgtccagtttgagtccttcattggaatcctctagtcaggtggagcctggaacagacaggaaatcaactgggtttgaaactctggtggtgacctccgaagatggcatcacaaagatcatgttcaaccggcccaaaaagaaaaatgccatacacactgagatgtatcatgaaattatgcgtgcacttaaagctgccagcaaggatgactcaatcatcactgttttaacaggaaatggtgactattacagtagtgggaatgatctgactaacttcactgatattccccctggtggagtagaggagaaagctaaaaataatgccgttttactgaggtaagagttactgacctttgtctgatcccagagggcccgttcttagtcatcaaagtggtatttagttgagcaaaagtgcaatatctgcttctctgtgtcagtgcagttaattgtgactttggacaagcatatttctctaaactggctccatccataggtgggcattcattctttctctttgacctctgttacctgttcatcctgctggtctcatgagatttgactggaaaacataaaagtgagctatagttgtaaacaaaattatcttgcattgaggcagaggaatttagcaaattctcatccagccagaggaatgggagatttccatgaacgctgaaggtaggagactcggaggagtcttgtaaacacaggaggaggtcatgaaggcttttctctttattcctgccaaatctgtaattcccacttgctgtgatattgcagcatgtgctcagtcacccaacctaatctctaagactgcggctggtttacagccctgaactcactgtccagaatacaagattcaaaccagggttgacccataggtctcactggttggtcttccatccactgccattcagacggatgccctggatgaatctggtgcggaagaccagggaagtggcaggacaaggaggcactgctggtggtggctgtggaaacacccagcctgacagaaggctttatctcagagtcagactgtcttgcccatgcttcagtcatgctgctttggcacatttaatgattttgtgtttccatttctgtagggaatttgtgggctgttttatagattttcctaagcctctgattgcagtggtcaatggtccagctgtgggcatctccgtcaccctccttgggctattcgatgccgtgtatgcatctgacagggcaacatttcatacaccatttagtcacctaggccaaagtccggaaggatgctcctcttacacttttccgaagataatgagcccagccaaggcaacagagatgcttatttttggaaagaagttaacagcgggagaggcatgtgctcaaggacttgttactgaagttttccctgatagcacttttcagaaagaagtctggaccaggctgaaggcatttgcaaagcttcccccaaatgtcttgagaatttcaaaagaggtaatcaggaaaagagagagagaaaaactacacgctgttaatgctgaagaatgcaatgtccttcagggaagatggctatcagatgaatgcacaaatgctgtggtgaacttcttatccagaaaatcaaaactgtgatgaccactacagcagagtaaagcatgtccaaggaaggatgtgctgttacctctgatttccagtactggaactaaataagcttcattgtgccttttgtagtgctagaatatcaattacaatgatgatatttcactacagctctgatgaataaaaagttttgtaaaccaaaaaaaaaaaaaaaaaaaaa

SEQ ID NO: 62 - DNA, 2478 bp, Homo sapiens
ggcccacggagcccaccatgccgcgcccggcccccgcgcgccgcctcccgggactcctcctgctgctctggccgctgctgctgctgccctccgccgcccccgaccccgtggcccgcccgggcttccggaggctggagacccgaggtcccgggggcagccctggacgccgcccctctcctgcggctcccgacggcgcgcccgcttccgggaccagcgagcctggccgcgcccgcggtgcaggtgtttgcaagagcagacccttggacctggtgtttatcattgatagttctcgtagcgtacggcccctggaattcaccaaagtgaaaacttttgtctcccggataatcgacactctggacattgggccagccgacacgcgggtggcagtggtgaactatgctagcactgtgaagatcgagttccaactccaggcctacacagataagcagtccctgaagcaggctgtgggtcgaatcacacccttgtcaacaggcaccatgtcaggcctagccatccagacagcaatggacgaagccttcacagtggaggcaggggctcgagagccctcttctaacatccctaaggtggccatcattgttacagatgggaggccccaggaccaggtgaatgaagtggcggctcgggcccaagcatctggtattgagctctatgctgtgggcgtggaccgggcagacatggcgtccctcaagatgatggccagtgagcccctagaggagcatgttttctacgtggagacctatggggtcattgagaaactttcctctagattccaggaaaccttctgtgcgctggacccctgtgtgcttggaacacaccagtgccagcacgtctgcatcagtgatggggaaggcaagcaccactgtgagtgtagccaaggatacaccttgaatgccgacaagaaaacgtgttcagctcttgataggtgtgctcttaacacccacggatgtgagcacatctgtgtgaatgacagaagtggctcttatcattgtgagtgctatgaaggttataccttgaatgaagacaggaaaacttgttcagctcaagataaatgtgctttgggtacccatgggtgtcagcacatttgtgtgaatgacagaacagggtcccatcattgtgaatgctatgagggctacactctgaatgcagataaaaaaacatgttcagtccgtgacaagtgtgccctaggctctcatggttgccagcacatttgtgtgagtgatggggccgcatcctaccactgtgattgctatcctggctacaccttaaatgaggacaagaaaacatgttcagccactgaggaagcacgaagacttgtttccactgaagatgcttgtggatgtgaagctacactggcattccaggacaaggtcagctcgtatcttcaaagactgaacactaaacttgatgacattttggagaagttgaaaataaatgaatatggacaaatacatcgttaaattgctccaatttctcacctgaaaatgtggacagcttggtgtacttaatactcatgcattcttttgcacacctgttattgccaatgttcctgctaataatttgccattatctgtattaatgcttgaatattactggataaattgtatgaagatcttctgcagaatcagcatgatttttccaaggaaatacatatgcagatacttattaagagcaaactttagtgtctctaagttatgactgtgaaatgattggtaggaaatagaatgaaaagtttagtgtttctttatctactaattgagccatttaatttttaaatgtttatattagataaccatattcacaatggaaactttaggtctagtttcttttgatagtatttataatataaatcaatcttattactgagagtgcaaattgtacaaggtatttacacatacaacttcatataactgagatgaatgtaattttgaactgtttaacactttttgttttttgcttattttgttggagtattattgaagatgtgatcaatagattgtaatacacatatctaaaaatagttaacacagatcaagtgaacattacattgccatttttaattcattctggtctttgaaagaaatgtactactaaagagcactagttgtgaatttagggtgttaaactttttaccaagtacaaaaatcccaaattcactttattattttgcttcaggatccaagtgacaaagttatatatttataaaattgctataaatcgacaaaatctaatgttgtctttttaatgttagtgatccacctgcctcagcctcccaaagtgctgggattacaggcttgaaagtctaacttttttttacttatatatttgatacatataattcttttggctttgaaacttgcaactttgagaacaaaacagtcctttaaattttgcactgctcaattctgtttttcgtttgcattgtctttaatataataaaagttattacctttacatatt

SEQ ID NO: 63 - DNA, 3106 bp, Homo sapiens
cggccgcggcccccgacgacctggccttgctgaagaatctccggagcgaggaacagaagaagaagaaccggaagaaactgtccgagaagcccaaaccaaatgggcggactgttgaagtggctgagggtgaagctgttcgaacacctcaaagtgtaacagcaaagcagccaccagagattgacaagaaaaatgaaaagtcaaagaaaaataagaagaaatcaaagtcagatgctaaagcagtgcaaaacagttcacgccatgatggaaaggaagttgatgaaggagcctgggaaactaaaattagtcacagagagaaacgacagcagcgtaaacgtgataaggtgctgactgattctggttcattggattcaactatccctgggatagaaaataccatcacagttaccaccgagcaacttacaaccgcatcatttcctgttggttccaagaagaataaaggtgattctcatctaaatgttcaagttagcaactttaaatctggaaaaggagattctacacttcaggtttcttcaggattgaatgaaaacctcactgtcaatggaggaggctggaatgaaaagtctgtaaaactctcctcacagatcagtgcaggtgaggagaagtggaactccgtttcacctgcttctgcaggaaagaggaaaactgagccatctgcctggagtcaagacactggagatgctaatacaaatggaaaagactggggaaggagttggagtgaccgttcaatattttctggcattgggtctactgctgagccagtttctcagtctaccacttctgattatcagtgggatgttagccgtaatcaaccctatatcgatgatgaatggtctgggttaaatggtctgtcttctgctgatcccaactctgattggaatgcaccagcagaagagtggggcaattgggtagacgaagaaagagcttcacttctaaagtcccaggaaccaattcctgatgatcaaaaggtctcagatgatgataaagaaaagggagagggagctcttccaactgggaaatccaaaaagaaaaaaaagaaaaagaagaagcaaggtgaagataactctactgcacaggacacagaagaattagaaaaagagattagagaagaccttccagtgaatacctctaaaacccgtccaaaacaggaaaaagctttttccttgaagaccataagcactagtgatccagccgaagtactcgtcaaaaatagccagcctatcaagactcttccacctgctacttctaccgagccatctgtaatcttatcaaaaagtgattctgacaagagctcttcccaagtgccgccaatactacaagagacagataaatccaagtcaaataccaagcaaaatagtgtgcctccttcacagaccaagtctgaaactagctgggaatctcccaaacaaataaaaaagaagaaaaaagccagacgagaaacgtgaaattttttttcctgaattggacatgtgtttgcaaacacttgtcttgaagattatgctgtttatgcaataatttgtgaacatgtacagagttttatataaatttaaaccaatttttaaaacaaaactgcggacaccaccataaaaatggaatcaaaagaaagttaatttatgaaattaagaggtcagcagaatatactcagtgatggaagacacttgggaaagtctttttaatagaacaagaacgatcttaatttaagaatattatcctggtttaacaacagtgccctgtttacaacagattgtgccctatctcatctgcagccgaggaataaaggattctgattagaaagagggttgcctacagattagtaagcaattccttggatcttatgcacagaacttgtaccatttgaatctgttttatgcttaaatcaaagtgctttgatcaaatgcataacctgccatatctttacatatttgttggtagcaatttgtattaaagaaatcacaagtgcaaataaaaagtcatttatcatttgtttaactaaactgtcatggtttagtttacaatttttaaaaagttcttaaaatactgaaaatgcagttgacacttgtgtatggcttatgaagttatttttgatagtcttacattacttgaattgttcaaagtacagtatattttaaattaagaaaagtgaactatatgtatttgttttatacatttaaggcttagactcataaataatgctattgtttatgatttgaaaactttcaggcaaaatccaatttacatttttcccttccctagcaattacttttttccagcttcaactcttcttagttactaatactttgttgactttaaaaatgaaatcattcacaaacttttggtatatgatggagaatgaaaaactagagtcagacagctttaattgacattgtcaacacctccagttatcaggaatacatttttttactgccttaacctgtagtgcgtagaatatgcatcaatttcttgaaggagattcatgtttttataagaattttcatgtaattattgcaattgtggtcaaataaggaacgtttcctgcttgaaattatattgatttaaatgatgtgtgagatgtttcaccattttcaggcactgtgtaattctattgtaataaactggcaggtatctttgtaactataaatagtgcatgctcagccatgtacactgtaaatagcctttaccaaacgtgtttgacaaggaccataattaacatcacttagtgaattgtgataaagaaaaaaaagccatgatttattcgatgtgattggcttgtttttatgtggcgccaagaacgaacctgtttaacagctgtaaccaatggtactgatctatccatccaatgttgtcattatatttgactgtggttcaacagtattgcgttgtcagactaggaaagctaaacgaacaaaatggttttagttttgctgaagactggccttattaatggacagctttcctaacaagagattattaacttttatcaggtgttaacatctgtttcaggaacatggcagtatgtttacatgtcagaagttttgtttaattctatggtatttctaaattgacttgtttaaataaattcagcaaatgg

SEQ ID NO: 64 - DNA, 3104 bp, Homo sapiens
ggggataagttttttttttttcttttttttcttttctctagtttttctttctggctgagatttccgtgcaagacagcacccaatagactatttagagttgacatttgacattttaatgggcgccatggctcattttgtagattgagaaggtgcgtctcccctgctccaagtctcatcatgacagcgtgctgacagctgggagtctgtggccttcctcacgcagaggccttaaagctggacacagatgcacgcctaggctgggcagggatgggacccatgccccctccttagaggacgggcttcctggttaggaaaggacacgtgggggtgccttgcataatagttcactggtcaccgtgcttttatgagtagtgtttttgtgcacttgccaggggttttctctctgtgtgcgaggggagtgatttaagcaatggtgtctggagtaagccttacaattttaatagactttttcttatcatatccctcatttctttccctgaaataaaaatacacacaagcaaaaaaaaaatgatagtttcacatctcttagttcccttgcccaaacaagaatattcttagttccactggccaggattttcctacatagtcagaacttacacattactagaggcacacccaccaaggagtattgtgtctacttttatctgtgcaccagccacaaatacccacattggaaagacccatttgtgatgggtaaacatcccttcctgtctcccacaacccctgtgactgccctgcatgtgttcatgacctccgaaggccctaattcatgaagcagcaaacccagcagatctccacccccctgcctcaggacctctgctgaagagggggatgaagtgggtctccagggaggcagtgggggccttgttggcagctggctcgggagccggcttacaggagggcagctctgcagttgggaggggcaccgtccggaggagaccaggcctctacacaccccccactctacttatcatccctgctcacacacccttgtccaaggctttatgcatcggatttatttttccaaatcgagaggacagtgatagatgcattttccccaggctgtctcagaaaggtcgctaaatgtatactgttgtcagaattgctgagatctccccccacttttggtttttgcagcagtaaaaactctttccactgtgacttattttctctctcaggcagccagccacctggtcccttgtgctgactctagcacagtggccaggatccaatacgagtccaggggtgaccgcaggatggtgggggcagcgggcttctccacctaccccagccaccaaggccctgacgcactgcctcctgcaccttcagcacatccctgtgcacagctggaagggtgcatggcccgctcacctttgttcagatgggtggaaacgctgatgataccagctcctccctgccgtgcccctgccacggagcaggcattgtgaactggctggtgtttgcagtcccacgtggcatggcctccagcccaacccacagtggagactggagacagggcaatgagtctggtcgggggcacgtggacatgccccataggggccccacccagacttaacaggcaaggtcctgggcattgcgcgacgcaggactcaatgctaaagcaagcctgcctggctctgtgccagggcccctcttctgatttacacatcccatttttacacagacccttccttcttaataaaggctgacagttctgttggcagccaagaacccacaccatgaagacagggagtgaggggcctttgtgcccaactccagcacagctgcgttctggggtgtgtgagaggcatgttcgtgtctgtgcgctggtggtctcgtgagacagttccgaggacggggaaattgcagggtggtgggggcgtgaggcttatatgtggaactgatgcagagttcgcctgcagacggatctggatatacactatgtataattgttacgtgtaatttaaaatatatctgtttgccatcgtcatgagaagattatatgtaaggctctgaagggagagggagatgtacattctgccaggctcctggggaccttatccgagtcatgaaattgatgactgttgatccagtggtgcaagaagctacactccatgtgtcatcacgcttatgactcctaatgtatttttaaggcaaaaaatgtcagccgactccatcttcacccctcgattcctcgagtccagcctttctgtgccagtgcttcactgagccacaacgctctcgccatcgggacccggctgggcctggagtctcggggcacagttgccatggagccctcctgggtcattctacaaatgtgctgagtgccagctgaaaaccccacaggagatggagtaccttggccaagcttaaagagaagattttctcagggtatttattagtgtgtccagcagggtcaggaagcaggatggaaagatgcattcagactgttaatttattaacaaggcaaatgattttgtgtttcttgatgacagactattaagtttgggacttattttcccatttgagaagttataatatatatttaagatgataagtttcctgcttaagttgtgcctttcagcttcaatgagtttaaggagcactaaggctaatgataccaatgagggttggtttattatcaaacctgaatagctgtggtttctccagtaaatattttcttctactgaacatggagccattattaagagttgtgtgttttttattatgtacatttgtatatttttttgcttgtttgatgttctatttttctaatagttttcttttagtttcttaaagttgtgatactagatttagattctgatgctaactgcaaatcaggttggtctctgctgggtctctcctgcttttattttactttaaggacaagtgtagttgtcgtccaccacctttcaaaaaatgtgaaactgccctgcctcccctttttgctgacaacactgtgtacattgaccacttcctaccatactttatgttgtaaaatcaaactcttttgtggtacattatctcatgcttctgcaaattcgaataaattctatggcttccaaaaaaaaaaaaaaaaaaaa

SEQ ID NO: 65 - DNA, 2655 bp, Homo sapiens
gaaaatgtatacctggcagcaggcactgtgtatggactggagacccagctgactgagctagaagatgccgcccgctgcatccacagcggcactgatgagacccatctggcggatctggaggaccaggtggccacggctgcagcccaagtccaccatgctgaactccagatttcagatattgagagccggatttcagccctgaccattgcaggattaaacatagcaccatgtgtgcgcttcacaagaagacgggatcagaagcaaaggacccaggtacaaaccatagatacatcaaggcagcaaaggaggaaactgcctgctccaccggtgaaagctgaaaaaattgagacatcttcagtgactaccattaaaacatttaaccacaacttcattctccaaggctcctcaacaaacaggactaaggaaaggaaaggcaccaccaaggatttgatggagcctgctctggagtcagctgtgatgtactgacaccatggaattccactgccagtgacccactgcctccggccgtacacgacagtgccttgacccaacagccatcgagtactgtatgtatttccacctgaggagaaggcctggggaggccacagtgcaccattgcacagggctgtcctgatacctcatccagaaagccgtctcagacttcagcactgcggtcttgcccactctctgccttaggctcccaggggaatccaagacagaaaatgaagacactggcttccaacagcagcgctccatgtttaagatacatattttccctgtttgctttgctactgtatgttgactttaagatctttttttaaatacatttgattcagctagtattccatgtcaacaatttgtccaaaggaaaactgctggagggaggtggagggaggaaggtgggaattattatttaatacatcattaatgcttattaatctctcacaagcatctttgtcttgcaaatcctaagggaaaagcaagtccctgcagtgagcactagggacagtctaatttggggattgctcaaccatcaagactgcaggtctcccttcagccacctccttcctgctaaaagcttagcctaccacactaccagtcattcccatcgctttgcaatcacaagccacaggatgagaagttctgactcactcatgccatgcccagggctatctgaaacaatgtctcattaagaatttagggttcttccatgggcttactgacagttgcccagatctgaaggggaaagggtcttgagaaagaccatcactggctcaactttagggcactgtccagagtcaacatgatgtggtttagcagtgatcacatctaaacaaagtttaggtaaatgaattatcgcagagaaaaaccacatgagaaaatttttgtactccaaatttacttcccaataaatattcagcaaagtagtaaaatgaccttaaagataaaaatgattagggaatagccttagaaaatttataggtataaaaaattcaaggacaaactgtgcatttaatggacacaagaattgactctaactccatgtctgtggtttctttgaacccatatcaaatgtatgactatttagagtgtttataagagataatggaactgaactttcactcaattaattgggcattaacaaccttcttttatgtttgttcctgatatagtctgaatcttaggaagaaggtaaaagaaaggaggcaagagaatagttatgatgaatatgtgttaagtgcctgctctgaaggaggcaatgttcttctcatttgaatccttatggcaaccttattcaataggttttcccatatttcagatttaataactgaaggccagagagattaatttgccaaagccacacctttatgctaattatgattggaatgcatcacaaaagcctaactctgttgttttcaacctctacgttattttgctgctatgtgcatttccagatctgattttctgctaacttgtgtgctatgatccactcctgatgggggtctacattaatcttccagtactccttgctgatgctgtgttatgtgtcatctaacagaaatgactcctttgaaataagtaaatctttggctttttgttctgttggtgtgattcaaagcaaaacaaacaaacaaaaacaaattttaagaacacaacaaaaaagatttgacttccgaatagaatgttttctttaagaggcatgaaaagcaactattgttgtgttacagtgttaaaaatattcagttttctttgacaaaaatgtgtactgtgtaagccttgcaaacaaaaaacaacaaaaaagaagcagcagcagcagcctgctgtgtggcatctgaacttttataaaggtttccttgtgccaaataagtgcaaagatttaatttactattaaaaaccataagcatatgttatagttccagaagaattattttgtcatcaagtgattttgatctttagtgtcaatatttatatttagattaatttttataaatgaaaatattttaatggtttaagaaaatgaggacaacaggataatatctttgatgacttctgaaagttatgcttcccttcatgttatatgcacattgccaagaattactgtcaagagaaatgataagtaaaagtcatttatgaaaataaaaaaaaaaaaaaaaa

SEQ ID NO: 66 - DNA, 2626 bp, Homo sapiens
gggtacggctgcgagaagacgacagaaggggatgtcacctgctttatttctggctttggcctgtggtctgtgatacccatcctgcttgatgttctgcagaatggcacttgactgctgggcatgcatgaagttaagggcaagaaacagtatgccatgtgttctgtaccatcatgtgtctcttcttgcttctgggcccttctactggtgaactttcatcaagatctgcgccatgccgtgtcactatcaagccattaagttttgtctgggttgctgtcagccccagttggcttcctggtcaacaaggacctcaagaactgcctgtggaccgaggccccctaccagtgcatgagacacacacctaccctccccagctttccaggaaccctactggctgccagactgatgggcgggctggtatgtgtggacatgtgttcactgtcattatgctgtggctccaggtgagggtgaggactgggcctatatagaatccagataccattgtcaacttcccttattcccgtctaagatgtgagcagagtgccatagtaggggttctgggaagaggtatttctgatttgtgggcctctgcttgcttgacttcaggtcacttatacttcttattttgcttgcctgccttcatccctcatttcctccctctcattcttctttcctccctccctttcctggtagcctcctttcctccccttctgccttccccttccttctttccttattcttttttattttgtttaaatagtaccacagagaaaacaactgaaaaaccacatttttctacatacagctggggaggtagctgagaacttggcactgcgcacacatactaggttgaaagagagttgaggaaaccagaaggccaagtggatctgctggcaaaccctgaacctgtctcctgcgcttgctctacagttctgaagttgaaaatcgttttcatgcctagcatctgcttgagttataaaccccaaggcagccatgtcatagactagtgtttactcttgttttgactttgttttaatgcttcctaagacccaagtgcctcctgctgtttcctcctttgtggtagcctctggccatctggacctcaatccccagctttcccactttcagcagtcctttgctctctttgcttctacctcaaatagccccaggagtgggctttagtctccaatatggagcatctcaagcttctcctgggggatggggattgggatgggcggaatctgttttggatctccgggttatttccagtgggtgtaaaagcagagctgggcctttccctctcttatccctgagggtgggtaagaaggactgtatctacacctgttcttccctaccttctcttttgttagggaggcctcattctaagttcctcaagagagtccttggcttaaagctgtagcaagggtgtgctaggtgggggatttggagcaaaaccgtcgagtaggcatgatactggtatggagtgggcctgcaaaatcagacagaaatggcttgagaagccgcagggggagcatgcctgtctctcagtgatagagtatgggagggacctccctagcttggaaaatgagaattgaaggggttatgaacaaataggatgcctagttgaggatgttcccaaagttttgtccaatcttatcattagtagattttataagccacagagacaaaccagaaacggaataatgttactttggatgctttatttttttgttctaggtgtggctttgtacatgcagaagaatgctatatgctgcacattttgcctttaaagtcttacgactttccccattttagtctaatgggaagatacagatgtgcaagtctgcttttttgttttttgttattatttttttttttgctctgtgttatggacattttcagacatgcacagaagtggagaggatggtccttggaccccatgtgtccatcacctagctgcatcacttatcagctatggtcaacctggtttcatctgtatctctctcttttcacctgtattgtttattgaaaatccaagacactatgccaatgcaaccgtgactactttgggagattggtagtctcttttgatggtgatagtgatggggtgcactatcataatcacatcaggtctgctttttgcttttaatgttaactaatgaagttccagagatgggccttagaaatgtgttttaagaattaacaaggagtctcaaaaagaaatgagagggatgcttcctttcccttgcatctacaaaacaagagagagactgttctgttgtaaaactctttcaaaaattctgatatggtaaggtacttgagacccttcaccagaatgtcaatctttttttctgtgtaacatggaaacttgtgtgaccattagcattgttatcagcttgtactggtctcataactctggttttggaagaataatttggaaattgttgctgtgttctgtgaaaataacctccccaaaataattagtaactggttgttctacttggtaatttgacaccctgttaataacgcaattatttctgtgttcttaaacagtataaatagttgtaagtttgcatgcatgatggaaaaataaaaacctgtatctctgtcaaaaaaaaaaaaaaaaaaa

SEQ ID NO: 67 - DNA, 1929 bp, Homo sapiens
gggggagaatttccattaggcaagctgtatgcagtggaattttccttttaggagacacacaattaagactctctggttctgtccttgctttggagactttaagacatttcctaaagcacaaataaaagcctcgtatttccccattgagagttttgttccaaggaatatgaagtgagacatatgggtgagttataataatcaaaataatttatgaagagctgggtctgcaatagctagtctaaaaactacttgtgtgtcagtcctctggttatagtatataagagcctgaggaggtctggcaagatagatggtgtattatttatggatcaggctgctgcatacaaaccttgcatactattatgcagcttacctaactctcagactattctgagtaatgcttgcttgctaatgaatgtataggagaccacattgtaattgttcttagatgatggagtccatgcagtttcttagaaatcggtctcagtgcatgctgtgctttttcacatttgctctgggttatctgggaagtatcaggttctgggaggcaacagcattaagtgataagaaaaggagacattctggcaaagccaatctgcttaaaggcaaagtccagaacctggaacctagaggcctttctctctgcacgaaaaacaggtagtttgcagtctgagatatgggagagcttttaggctacacagcaacccaagggacctctcaccttttgctgagcttcaatcaggaagctatttgcctggctccagcagatgatgagataatgaggtagtgggttttttattactgttccattttgcaacatcctgcaacaccatcctgggagacaagagcattaccgagcttggctttcacgggggagggttgtattcagtaaaaaagaatagtaaatataaggtcactgagattctaagtaagatagtaaatctaaggtcactgagccaaatccttttcaataggcatatattaacaggctgcttattttggcggaggttacatatggatgaaaatgaatcttagtcactgaatattcatatacatttcccccaaaaccttagacattcatagtagattttaattagttagctttctaactagtcagatttctgcccaaagtgcttagtcaatagtaattaagatatagcttcaaaaatggctttgcttttgatttctactcatattcgtatggctccagaaaaatatttttttcatatttgacaatgtcagctccactttagaaattttcaataaccagatgagaaaaaaattaagaaattgctcaagggaaacatttgtaaatggatttgaaagattgagccaaattctgttgtcagttctaagcatgcagttctcacctccatttagtcccccatcagaacagaggtcaggaatttagctggggagcctaaatttagttcagcttacctttgagaatagcatcaattcagactctcttttcattatgttttcttttctttttccctctttttaaactacattgtgttagagtcgtagtctaggatcctgagagattttccattcttgtcaccattcacttgcattgtaaagattttctttgtctgttgttggcatagattcttttgtacatatttatttatttgtgtttatatatgtcaattggtttcctttcttagcttgatattgcctagctttgttgttttaattaactttctattagagggactgtatatattttttctaaatactttgtgaaatcatttttggtagcaatatctttgaatatgatgaataaaagtgactgtgagtgcaaatagaattagcagtaagaagctactctagctaatttgccatttcacttaaatggaaaatgtttttcaaataaatacttatgttgttcatgttccaagttattcaaaaaaaaaaaaaaaaaaaaac

SEQ ID NO: 68 - DNA, 1866 bp, Homo sapiens
attcttgtgagtggattacaggtttttgatcccaaaattccagagctttcaactctctgaatttgtagtcctgaatatcccagtggtgggggttcccagcattgtgggtgctacttgcaaggccatagaatctagatggccctgtcttgaccctgaaatgaaccttaagccttagaacaaagtcatgcagatgccccatttgataataatcttattcacctgtgctctggtcctcggtttctgcatgtgttagcattgcattgataactcagaatcttgataaacacttaatatttgggcctgaagcattaaactttctttttattgtatatacttaaaaaatagaactcactgccctatcatacattgtagccctcttattctttggtctttcatatgcattagttaaatcccttaaagtagacattcataaaaacttacattgtttattggagtataaaatattacccaagtttcttcatgagttgacatgagctgttttaaatactggtgtattttcagaacagtaaaattactgaatatcagaaaaaatgttaattgatgatgaagcttattcccaaaatgccttttgtgcatatgatacttggaaagtcactaatgtgcctcagttaatacatcagtaaaatgttgtgtttcttttccagtgtagtgtttttggaatataaattccccatgctagtatagtatctcagcaaagagaatttccccccaggaggctcagtaaaggaataccgtgtcttacccatcgttatgatggaaggctgctttgaaaatggctgttttaccttataaggttaaaattttgatccatatgttaagtgatagaagattttggtgcaacagtagtaggatatatttctcctagaacatcccttattggcttacatgattttattgccttttaatagatattttgtcattttggccaaacaaaagacactgagtagttacacttaagttaaaaatgaggggaaaatcattattttaggtgtggagccatttttattataaaactttctcaaaataaaaaaacattgaatcatttcaatttttgcagtccctgtattagtatatgaatacatacttgccatttgaattaataacatgaaaagagtatactgtgtttttaaatccgtgtttctttgaatttaaagggtgtacaggtctttctgtagggaaaattattccatgtaaacatttcaactctgtatgaaaatgttaaatattgtaagaaagttatcctctcattttttcactgctatgatatatttattataaaatagggaatgaatgaatgaatatggattgctgttaactagaaacacttctgtatgtcagtcagcatttaatgaccacctactgtgtgcacagcactactggtaaaattttgaagacattgttaacattaaaaaatattttaaagttgtctacaaatctgagccttgtaatgatgtatatttaagttatttttgtttttatagattaaagtaagattaaaatatactatccagttttattactaaaaaagactggttttaattttaccaatgtgtgaactataaaagctttttgcctacagattttacattttaaaattatctatggctgttttaaattgtctagcaatttatatggttgtggttaactcatttaagaaacaattatctttctatattaagccattttcaaatagcaagacagtgcttgtctttttttgttattacactaactgcaattcagtaagctgcatgacaaaatatgtattatgtaaataaactgggtttactaaaaaaaaaaaaaaaaaaaaaaaaaaaaaaaaaaaaaaaaaaaaaaaaaaaaaaaaaa

SEQ ID NO: 69 - DNA, 2224 bp, Homo sapiens
atccaaaatatctcagtatcatctgtctgaagcattgtgtgttctcattcgggtggtaacaatgtatgtgtaatatttttttcttagtgattttgacagtttaaatgtttaacaacttaaagcattaaaaatgcttattaataactttggtcatttaaaaaatgctacaatgacttcctattaaaggttcaatatttacacattcttattggttgatattaccacatgaaatattgccagaccaagatacctaaactcatgatgtctgtggtgctgtaaaatttatactaaaatgtggactattttgaaattataaccatttttgatgccctgaatcttgaggtgacttattttgcatagaggatatggatagaccaacagtaagggttgtgggttataccggcatagagaaaagaagaaaactagaattgaaacaactgtgtcttagacatttgtttgaaaaagcttcatcaggccttggagcagtcactgctttattccgcaaaaattatttggtaggaaatttttgggagatctgattttcttatccaagttttgtaaatagttgttatttctatatttggattggtgaaagacctcaagtttatatgtaaagacataactgcccttagtcatgaaattgttgtgacctctactttttgtcactaatagcctacattcaagtgcctgtgttttttcatcttgtttaggaatgttttgagattaatgtgcttaaaagtcctacgtgactgattttaaacattgtgataaaattaattttcagtagaatagttgaatgtgttaagataggattttatgttagagataccagaatgctggtattctactacttgtgcaatatatatgttttaaaaaacaaatttgagaatacatttaatcatagggatatagatataagcacctctctaaagaatctttagtttccgacgttgaattatagaccagtttgagtaagtactgctttttttttttggagacgggctctcgctctgttgctcaggctggagtgcagtggcgtgatctcagctcactacagcctccacctcgtgggttcaaacagttgtgctgcctcagcttcccgagtagctaggattacaggtgcatgccaccacacctggctaatttttgtattttagtagagatggggtttcaccatgttggccaggctcgtctcgaactcctgacttcaggtgatccacccatctcagcctcccaaagtgctgggattacaggcgtgagccaccatgcccggcccataagtaccgtttttgaggttcagtcttaaacatttgctttaagaaaacagtcttgaatttcacatgctgctatttttatattttgccattttacagtactgttttgttttgaattcatgcatatcattgaaaatttctcgttttcattttcttagatgacttcttgtctgagacagaaaaatttcctactacagcagtgcagtccagaggttaagatgtattagaattatacaatatcagtttaaaaatctgtatgcataaagaatgcaccactcaacttttttattcataagctaatatttttttaaagttacattaagattttttctcttttgcagctacatttgaaagtgatagaataaagagattttaatgagttatcactttttcagctgatatattcattttaatggcttttttgaaagttcctttttcatgaacacacccgagaaatcttaaatagacactttgcaatatttaagaacctaatgctgtttaattttggtacagcttccacattgcatgttcactttagtatttgcaatttgatatatttcatggtggcaaaatattagctctgttttgggacattttaaaatagaactatccttgttcgatagcataggaaaatgttctggtgattgtcagggtctcctaatatttatctcaattcttttataagtctatggaaattatttaattattttaaaacgtacacacttttcttgtaaatatgtcacatctgagttcaaaaaaattactttgaataccttaatatttgctgcatttttttccgtatatataacatgtcttctttcagaatgggaatatatgtgtgcctcccaacatttactgttaaagtgtgttatctttatatgtcaaactggttgaacactgtaatgagaataaactgcacagagtttaaaaaaaaaaaaaaaaaaaaaaag

SEQ ID NO: 70 - DNA, 3447 bp, Homo sapiens
gggcacagggtgctccccagacctccctcctccaagtagagctgaaatgggaaggaacccctgggacagcccctgccctgctagatctttgcctcagattgctgctgtggccaggcccaggatctccagccctatggctctgagtcctgacatgctgggggcccaggggctctggacacactccatccagggatcccttcctgccatctgggcagcaaccatggggacaaagggaggaagcagagtcctgtttccttgccacttgtccaaggcacttccccatcctgacagcggcccccacccagcccaggattctgggttgtggtctcgagctcacttcccgttatctttggggctggggctgacatcaggaggacatctgactggtggatggagccagcctgggaacatcgtagctggggcagtgcctagggctctcccttcccagagagacatggagaatggggttgagggagggcccttccctagccgctgtggcaactccagtgagctgttctgggcaaagtgtggcccaagtcggcagccccagccctgcagtgctggggacgctgacaggacacgggaagaggccatgctctccctcgggacctgctgttccatgtgtcccaagccctcctgctttccagatggcccctcaggaaaccacctttccagggcctctgctcccttgggcgctcgctgggtctgcatcaacggagtgtgggtagagccgggaggacccagccctgccaggctgaaggagggctcctcacggacacacaggccaggaggcaagcatgggcgtcttgcgggcggtagcgccgacactgtgcgctctcctgcagacagcctctccacgtcaagcttccagtctgtcaagtccatctctaattcaggtgagcaggctggcgtccatgtgctcacaggggtgagtgccccacggggaccccagcctgggtggcctctaggggtgctgaccaggtaccctctgctgggccaagctccaggatttggggatgaaggtgcagctgaaaagagccctgcaagctgaagccaccgggaggggattaagggggggtgggcaggaccagggaccagtcacagggcagtaaggcctcacagcaggcaccccagggtggggcagcaagcaggcaggaggggcctccccgggtggccgcctagggaggacgtaccctggctgcccagcagcagccctgcttggccgtgtccccgccacaagcaggcaggacacaggagggatggcactgcccacggagccctgggctcatggcaccttctgcagagtgaactgggagcagagagcctcttttccccactctgtgaggccgggcattttcctcagcccagccctaaccctcaccattcctgtgatgggcccaggtgctggacgggccttgtccttgccgaggaaacccatgcaggctgggtcccaagcctctcatgcagtttcattttacccaagatggggccagcttccactatgttgattgttctagagtgttcacaggcaccacccatgggcttcaccctcagaaccacattgattccccccagaaccctccaaggcaggcttccctttacagaggaggaaactgaggcagggacaggggcttcttgggtacacacagctgttcctggaaaacttgggcggtgactgttggtgcctgcagtgaccggccttgtagggtctgacttgcagccaactctcaaggcaaggccaggccccagcccggctccttcaacaagcaagattcaaaagctgacgtcccccagaaggcggacctggaagaggagcccctacttcacaacagcaagctggacaaggttcctggggtacaagggcaggccaggtaaggcttgggtgttcctggggtgcaagggcaggccaggtaagtcttgcctgcaccctaagggccccatgactacatttactaggctcacgccctgcagtcagccaactgctctgcccctagctccaggggcctgtctccagggctcatgatagcagatgacggccacgctctacccatcggtgggcgctgtcttcctcccttcccctgggggtcctgcagagtacctgtgctgacctgagcccacgaggggggccagtagcggcccctaaaccacttcctcagagaaaagtaaagtaatattctgaccaagagaaggcttgctgcccctggccacagcctgcctttggagggcactaggccagcaggtcagagtaggaacaggttctggtgatccctgagtttgcgggactgccctgagatgctacagagcgcacactttcagcagcgcaaccagcaggacaggctcctgcatctgcacatcccgagaccaggcctggagcaagatgccccactgggtgtggggtcacgaccaagagcagcctggcagctagctggtcacccactgaagcccatctgacccttagggcaccttcagaggggagaaagggacaggccccagtcccagagacccccacctggtgcccagagcaccctgctcagtgggagaggggaaccaggccctcttccccacattggcctgggcgctgcctggggaggtatgctgggtgggtggttagacgcacctgggcaggtcacctctggctgctgcaatgactgtttcagaaaggagaaagcagaggcctctaacgcaggagctgcctgtatggggaacagccagcaccagggcaggcagatgggggcggcggcacaccccccaatgatcctgccccttcccctgcgaaagcccaccacacttaggcagtgcgaagtgctcatccgcgagctgtggaataccaacctcctgcagacccaagagctgcagcacctcaagtccctcctggaagggagccagaggccccaggcagtcccggaggaagctagctttcccagggaccaagaagccacgcatttccccaaggtctccaccaagagcctctccaagaaatgcctgcttctgagcccacctgtggcggagcgtgccatcctgcccgcactgaagcagaccccgaagaacaactttgccgagaggcagaagaggctgcaggcaatgcagaaacggcgcctgcatcgctcggtgctttgagctacccgcatctggtcagtgccaggcccaccaacctgcagctggagattggctctctatagcatttcctgacacttccgctacttttaggcctggctaaattccaagatagataacactcaagatagataaagtacttgatctccaaactgacaaactgtttattttctagctgttattttgctatttggcatttacataaaagcacacgatgaagcaggtatcgccttacctgttgaaactgaaaataaagcttgtttatttccaaaaaaaaaaaaaaaaaaaaaaaaaaaaaaaaaaaaaaaaaaaaaaaaaaaaaaaaaaaaaaag

SEQ ID NO: 71 - DNA, 1035 bp, Homo sapiens
ttttcttttgagaattgctttctttagtgttaagacctactcatattttgaagaaatcttgagttaagtgagttctgaggctgctgggggaaccagatcaattcaaagctaaatacttctttcagaaaggggccactgtggaaagtgctggtggggtttgcccttgatcaagtgcctccattgtgctgcaagggctgtagacagcagggtgggacagtcagtcctccgagcagcaggaatcatcccgtcacctgcagccttcccatgcttccgcctttattcagaactttctgtgccactgtagatagctcaggcaaaactattacctgggtatttatccactaatgagtcacaagaaaaggagtggatttggtaagaatagagatttgttttatttaaaccacttcccattactgaccattaaaagctcaccactagagttcctgaaacaggtgaaacctgtatgacagcccttccactttggggagccacgcttttgatgtgacagtaccgcagagtgattcccccactgaggatgtcatcatcaaactcttctttggtgtgtgaattattagtggaaaagacccagctgtaattagacctccactgtgtacttagctggaagaacatgttaattctgcaatatgtttcttggttaaacattgcacagttcttacctcatttctgtaaataaagttttgtgaatctgttttgtattgtgacaaattcataagataacattgatattttgatttgtaatatttctaattggtagatttaattgaaaagtaaaattaatttatttttatatgttcaggggaattttaaagtcaaatcttttgtagataatttaaaaaatcagtgtggtttattttacttatttaacccactggttgttattctgtaacagtttgtataaatggtaaattttgaatgtgttgttattttacctagatgtaaaattccacatgtattaaaatgtacaaaatgttttgttaataaaatttaataatgttaaaaaaaaaaaaaaaaaaa

SEQ ID NO: 72 - DNA, 4060 bp, Homo sapiens
tgcgggcggccggctaggaggcttggcccccaccccgggacccccgccgtccccgggccggccggccggtgggcacgatgagccaggtgctggggaagccgcagccgcaggacgaggacgacgcggaggaggaggaggaggaggatgagctggtggggctagcggactacggagacgggcccgactcctccgacgccgatccggacagcggcacagaggagggaggatgattacatggaagccctggccaggctccacctcacggtgaccagggcctacaaagtgaatactgacatcaacttcgaggtgtttattcataaagtggatggtctgtcagatgaccacaaaattgaaacccaaagagatattcaccagagggcaaacgatgaccttgcagatgctggattagaaaaaattcacctcagcttttatctgacaagcatatatgatcattcaatatttgaagcttttagcaaagttgttcagaaactgattccacaactcccaactctggagaatttgctgaacatctttatctcaaattctggaattgaaaaggcatttctatttgatgtggtcagtaaaatttatattgcaactgatagtactccggtggatatgcaaacctatgagctctgctgtgatatgatagatgtggttattgacatctcttgtatttatggtctcaaagaagatggagcaggaaccccctatgacaaggaatccacagccatcataaagcttaataatacaaccgtgctttatttaaaagaggtgacaaagttcctggctctcgtttgctttgtcagagaggaaagctttgaaagaaaagggctaattgactataattttcattgcttccggaaggccattcatgaagtttttgaggtgagaatgaaagtagtaaaatctcgaaaggttcagaatcggctgcagaagaaaaagagagccacccctaatgggacccctagagtgctgctgtaggtgaggtttcaggaatgtcttttgaaatcagaccttatccatgaggctgctgcgccatgttgcactaaaggaagaggaagaaggagattgggacacataccattgatttgttgttaaaaaaaaaaaaaattcctgcaaccctcttgatcttctcttttataaataaagtaagcactttgaagcaaaaacttgtatattaacagtgatgtgaaatccattgtcatttcattacacaaatgtaaacttttatggtctgtagtcaaaaaaatcccgtgtgagaactgccaggaattgtacatattttgcactttttcatgtttctcattgaactgaactttgataaaacgacttttctaagctttttttctgtacttggtgtcaaggacatgcatactgtagtccatatctatatggcaatcagaaattaatcaaaaagtgatgcattggtaatgactttttgtaaatttggaaatctttgctaccaattgttgagaaaaatcatttttcagtggagctggaacagattggagctacaagctccaggagcaataagaactgtcccctatttataatgggtgtaaacagttttgtagaataatgctagcaccagacttacctaaaaatttctatagcagtggctgtgcttccctgctcaacggtttttatgaagctgtttacctcaacacacatctctataatcactttatacagagaggttatttctttttgttgcattagtattcttttgaaactttgggaccagatttccaaaatggtgccgaacactggaaaaaagtaagaatgtcactgaattgtagggtttctggaggcttttctgtacctaccacccagggctaaagtaacatcagaggcctaaagttgttccaaaagtatgtgattggcaactgcagactaaaaaacatagatacaattctggacttttggccctgtgcgatggtctggtgtgctgcatttaaaatgcttattcaggaccagttctttattgctccatgaccatagtgaatagaacaaatcgcagaaccccaccatggagctcaatcctgttagtcacttttgtcacctccacatcttcttctcactggtgaaaacatgcctcatgtactccacttgttcccaccttatgattaagccaagctcagcctgccaccagcatgctctgcaaggctgaagagtcatcctgaagacccctaaaggtcagtgggaaaaggatggctggagagacattacaattagctgtgtaattgtttctgtgaaattatttcacttatgtttactttagactaacaggaaattaagagtcctaaatctacccctatgccaaatcattccaagtagataattttacgtgcatctcaagggttagcaccctaaagcatgcttgtggggcattagaaaatgagatttttttttttttaaagcagagcctcctaagaacatcaaagttggtcctagcaaaatatataaagtccctaaagcaacttatacttgaaactttttttttttttttttagaggggggcctcattctgttgcttgtgctggaatacattggtacaatcatagctcactgttacctcttgggctcaagggatccttccacctcagcctccctagtagctagaactacaggtgtgcacaaccacgcccggctaattcttaaattttgtttttgtagagacaggatctcactgtgttgcccaagatggtctcaaactcctggccccaagcaatcctcctgccttggcctcctcaaatgctgagattacaggcctgagctactgtgcccagcctaaactttcccacttctctctgtggcttctttccaacctctctccttcctctccccaagtcctgtttctttgaagctggtaactgaatttaagatgatatctggttggtgtttaaggtttgagcctcccaagggtctgtgcattttgaaaggagatttctaaaaataattaaggtgccctaactcctttcctcatgattcctactccgaaacctggatggttaggagcccagggctccctgatttccagagctatatcctgttggacctttgccaacagacctgacacttaggggttattgttataaatctaattctctaatattttttacatgttgtttcactttgaataagcaaatgaagaatcagttttctaatatgactttatcctcaagctagagacactagcctatttggtaaatcacacattacttaggtatatttattactataaccaggttggagcttccatgtttaagctgggtatatgatgggtttttgttaaaatgtgccttaaaaagcctattacttcaagagcaaatgattctttgggggaaaggcaaaaataattctatgacatagggcccaagttcatggtagtaagtgcactctttgattaatcacacgctaatatagattactgcctctaactttgtaagtgtggcaatgacttcttaattaaagaaagatgcaggagttatgtctaagcgttcagtttttcaaatctgtgttattggaaatgtcttcaagtcattttgcattgtatttttgatatgagaggcagcttattgcgatgtgtatggccatgtttcattctcaaatttaattctataaatacaaatcctaaatacatggctacagcaactgcactggaacatttttgcttggttttagggattgagaacttgccttgcaggtttccttcctcaaaaggagcagggcagtcctttccctgttgagtcaattagaatttttacatagaggtgagactgtgaattattttggttattttcagtgatgtagattagtgtgaatgaccagggtggaatgtttttgaaggaatataaagcaaaaactggttgacattcacaaactgttcttttgtgaacatattttggacccttaaatatgactaaaatcacagcaatattgttacatacgggttatatgccaactctgtttgaaatatactctggaaaaacagctgaattgtcttggttattaaagtatggtatgtattcaacttgtaaaaaaaaaaaaaaaaaaa

SEQ ID NO: 73 - DNA, 1200 bp, Homo sapiens
cattttggtgcgagagaaacaataggacggaaacgccgaggaacccggctgaggcggcagcagagcatcctggccagaacaagccaaggagccaagacgagagggacacacggacaaacaacagacagaagacgtactggccgctggactccgctgcctcccccatctccccgccatctgcgcccggaggatgagcccagccttcagggccatggatgtggagccccgcgccaaaggcgtccttctggagccctttgtccaccaggtcggggggcactcatgcgtgctccgcttcaatgagacaaccctgtgcaagcccctggtcccaagggaacatcagttctacgagaccctccctgctgagatgcgcaaattcactccccagtacaaaggacaaagccaaaggccccttgttagctggccatccctgccccattttttcccctggtcctttcccctgtggccacagggaagtgtggcctgaataccccaccccggctcctctgcacccagagctgggggccacctcagaagtgtcatctctctctgagcacgcattcccctgcagcagtcgaggactgagcagattgagtgatgctggggcagagaggcctgggaggaaaggtgttcagccagtcgtttgtaaggcgctcgtcggcacctgctgaaacgcccccacctgacagccccatcctcaaagactgtcttaattactcatggcaggttctagagacttaaggggaaaagctgctttcaaggccaccacatgtctgtgctccccaaccagctctatctgccttgtgttcattttgttattttgtgacgtgagactgcaaagaccaataaaaacatattttataagaacaaaaggcctgggtgcctacccgtgtgggggcactgtgggaagcctttgctagggtgtcttgtgctgtgtggtttgttttgtttgcccctttattttgctttgcttacccagtcttcccttactcttggatgcttcttaaccctcaggcaaacctgtgttccccctgtattcaggctctgctttaaagcaagccatgaggctgttggagtttctgtttagggcattaaaaattcccgcaaactataaagagcaatgttttcagtcttttaggattagaagaattacataaaaattaataaacattttcaatgatggaaaaaaaaaaaaaaaaaaaa

SEQ ID NO: 74 - DNA, 2273 bp, Homo sapiens; identical to SEQ ID NO: 4

SEQ ID NO: 75 - DNA, 2591 bp, Homo sapiens
cccggacgtgcggctcccctcggcctcctcgccatggacgcggacgactcccgggcccccaagggctccttgcggaagttcctggagcacctctccggggccggcaaggccatcggcgtgctgaccagcggcggggatgctcaaggtatgaacgctgccgtccgtgccgtggtgcgcatgggtatctacgtgggggccaaggtgtacttcatctacgagggctaccagggcatggtggacggaggctcaaacatcgcagaggccgactgggagagtgtctccagcatcctgcaagtgggcgggacgatcattggcagtgcgcggtgccaggccttccgcacgcgggaaggccgcctgaaggctgcttgcaacctgctgcagcgcggcatcaccaacctgtgtgtgatcggcggggacgggagcctcaccggggccaacctcttccggaaggagtggagtgggctgctggaggagctggccaggaacggccagatcgataaggaggccgtgcagaagtacgcctacctcaacgtggtgggcatggtgggctccatcgacaatgatttctgcggcaccgacatgaccatcggcacggactccgccctgcacaggatcatcgaggtcgtcgacgccatcatgaccacggcccagagccaccagaggaccttcgttctggaggtgatgggacgacactgtgggtacctggccctggtgagtgccttggcctgcggtgcggactgggtgttccttccagaatctccaccagaggaaggctgggaggagcagatgtgtgtcaaactctcggagaaccgtgcccggaaaaaaaggctgaatattattattgtggctgaaggagcaattgatacccaaaataaacccatcacctctgagaaaatcaaagagcttgtcgtcacgcagctgggctatgacacacgtgtgaccatcctcgggcacgtgcagagaggagggaccccttcggcattcgacaggatcttggccagccgcatgggagtggaggcagtcatcgccttgctagaggccaccccggacaccccagcttgcgtcgtgtcactgaacgggaaccacgccgtgcgcctgccgctgatggagtgcgtgcagatgactcaggatgtgcagaaggcgatggacgagaggagatttcaagatgcggttcgactccgagggaggagctttgcgggcaacctgaacacctacaagcgacttgccatcaagctgccggatgatcagatcccaaagaccaattgcaacgtagctgtcatcaacgtgggggcacccgcggctgggatgaacgcggccgtacgctcagctgtgcgcgtgggcattgccgacggccacaggatgctcgccatctatgatggctttgacggcttcgccaagggccagatcaaagaaatcggctggacagatgtcgggggctggaccggccaaggaggctccattcttgggacaaaacgcgttctcccggggaagtacttggaagagatcgccacacagatgcgcacgcacagcatcaacgcgctgctgatcatcggtggattcgaggcctacctgggactcctggagctgtcagccgcccgggagaagcacgaggagttctgtgtccccatggtcatggttcccgctactgtgtccaacaatgtgccgggttccgatttcagcatcggggcagacaccgccctgaacactatcaccgacacctgcgaccgcatcaagcagtccgccagcggaaccaagcggcgcgtgttcatcatcgagaccatgggcggctactgtggctacctggccaacatgggggggctcgcggccggagctgatgccgcatacattttcgaagagcccttcgacatcagggatctgcagtccaacgtggagcacctgacggagaaaatgaagaccaccatccagagaggccttgtgctcagaaatgagagctgcagtgaaaactacaccaccgacttcatttaccagctgtattcagaagagggcaaaggcgtgtttgactgcaggaagaacgtgctgggtcacatgcagcagggtggggcaccctctccatttgatagaaactttggaaccaaaatctctgccagagctatggagtggatcactgcaaaactcaaggaggcccggggcagaggaaaaaaatttaccaccgatgattccatttgtgtgctgggaataagcaaaagaaacgttatttttcaacctgtggcagagctgaagaagcaaacggattttgagcacaggattcccaaagaacagtggtggctcaagctacggcccctcatgaaaatcctggccaagtacaaggccagctatgacgtgtcggactcaggccagctggaacatgtgcagccctggagtgtctgacccagtcccgcctgcatgtgcctgcagccaccgtggactgtctgtttttgtaacacttaagttattttatcagcactttatgcacgtattattgacattaatacctaatcggcgagtgcccatctgccccaccagctccagtgcgtgctgtctgtggagtgtgtctcatgctttcagatgtgcatatgagcagaattaattaa

SEQ ID NO: 76 - DNA, 3672 bp, Homo sapiens
acatgtgcatatttcattccccaggcagacattttttagaaatcaatacatgccccaatattggaaagacttgttcttccacggtgactacagtacatgctgaagcgtgccgtttcagccctcatttaattcaatttgtaagtagcgcacgagcctctgtgggggaggataggctgaaaaaaaaaagtgggctcgtatttatctacaggactccatatagtcatatataggcatataaatctatgctttttctttgtttttttctttcttcctttctttcaaaggtttgcattaacttttcaaagtagttcctataggggcattgaggagcttcctcattctgggaaaactgagaaaacccatattctcctaatacaacccgtaatagcatttttgcctgcctcgaggcagagtttcccgtgagcaataaactcagcttttttgtggggcacagtactggatttgacagtgattccccacgtgtgttcatctgcacccaccgagccaggcagaggccagccctccgtggtgcacacagcacgcgcctcagtccatcccattttagtctttaaaccctcaggaagtcacagtctccggacaccacaccacattgagcccaacaggtccacgatggatccacctagtcccaccccagcctttttctttcatctgaacagaatgtgcatttttggaagcctccctcactctccatgctggcagagcaggagggagactgaagtaagagatggcagagggagatggtggcaaaaaggtttagatgcaggagaacagtaagatggatggttccggccagagtcgatgtggggaggaacagagggctgaagggagagggggctgactgttccattctagctttggcacaaagcagcagaaagggggaaaagccaatagaaatttccttagcttccccaccatatgtattttcatggatttgagaggaaagagaggaaaatgggggaatgggttgcaaaatagaaatgagcttaatccaggccgcagagccagggaaggtgagtaaccttaggagggtgctagactttagaagccagataggaagaatcagtctaaactggccatgctttggaagggacaagactatgtgctccgctgcccaccttcagcctgcaatgagggactgaggcccacgagtctttccagctcttcctccattctggccagtccctgcatcctccctggggtggaggatggaaggaaagctgggacaagcagggaacgcatgattcagggatgctgtcactcggcagccagattccgaaactcccattctccaatgacttcctcaaccaatgggtggccttgtgactgttctttaaggctgaagatatccaggaaagggggcttggacactggccaaggagaccccttcgtgctgtggacacagctctcttcactctttgctcatggcatgacacagcggagaccgcctccaacaacgaatttggggctacgaagaggaatagcgaaaaagcaaatctgtttcaactgatgggaaccctatagctatagaacttgggggctatctcctatgcccctggacaggacagttggctggggacaggagaagtgctcaatcttcatgagacaaaggggcccgatcaaggcagccacaaggccttgacctgccgagtcagcatgccccatctctctcgacagctgtcccctaaacccaactcacgtttctgtatgtcttaggccagtatcccaaacctcttccacgtcactgttctttccacccattctccctttgcatcttgagcagttatccaactaggatctgccaagtggatactggggtgccactcccctgagaaaagactgagccaggaactacaagctccccccacattcctcccagcctggacctaattcttgagaggggctctctcttcacggactgtgtctggactttgagcaggcttctgccccttgcgttggctctttgctgccagccatcaggtgggggattagagcctggtgtaagtgcgccagactcttccggtttccaaagttcgtgcctgcgaacccaaacctgtgagtctcttctgcatgcaggagtttctcctgggcagctggtcactccccagagaagctgggccttcatggacacatggaactaagcctcccaaatgggagttctggctgagcccagggtggggagatcctgggaagggaggcactggaggaagacggcacctcttcccccatggcagggtgtgagggaggcaggtttggaatggtgcgagtatggcaatctaagcaggggtctggtctctttgactccaggctcgctttggccgactgtctgctcacccagagaccttggactccggactatccatggctccgaatctaagtgctgcccactcccatgctcacacccacagaaggtcttcccatcccctttagattcgtgcctcactccaccagtgaggaagatgcctctgtctttcccacgactgccaggagatagggaagcccagccaggactgaccctccttcctccagcctgccctgacccacctggcaaagcagggcacatggggaggaagagactggaacctttctttgacagccaggcctagacagacaggcctggggacactggcccatgaggggaggaaggcaggcgcacgaggtccagggaggcccttttctgatcatgccccttctctcccaccccatctccccaccaccacctctgtggcctccatggtacccccacagggctggcctcccctagagggtgggcctcaaccacctcgtcccgccacgcaccggttagtgagacagggctgccacgcaaccgccaagcccccctcaaggtgggacagtaccccggacccatccactcactcctgagaggctccggcccagaatgggaacctcagagaagagctctaaggagaagaaaccccatagcgtcagagaggatatgtctggcttccaagagaaaggaggctccgttttgcaaagtggaggagggacgagggacaggggtttcaccagccagcaacctgggccttgtactgtctgtgtttttaaaaccactaaagtgcaagaattacattgcactgtttctccactttttattttctcttaggcttttgtttctatttcaaacatactttcttggttttctaatggagtatatagtttagtcatttcacagactctggcctcctctcctgaaatccttttggatggggaaagggaaggtggggagggtccgaggggaaggggaccccagcttccctgtgcccgctcaccccactccaccagtccccggtcgccagccggagtctcctctctaccgccactgtcacaccgtagcccacatggatagcacagttgtcagacaagattccttcagattccgagttgctaccggttgttttcgttgttgttgttgttgtttttctttttctttttttttttgaagacagcaataaccacagtacatattactgtagttctctatagttttacatacattcataccataactctgttctctcctcttttttgttttcaactttaaaaacaaaaataaacgatgataatctttactggtgaaaaggatggaaaaataaatcaacaaatgcaaccagtttgtgagaaaaaaaaaaaaaa

SEQ ID NO: 77 - DNA, 640 bp, Homo sapiens
cgcgcgcccgaacgaagccgcggcccgggcacagccatggcccggcgggcggggggcgctcggatgttcggcagcctcctgctcttcgccctgctcgctgccggcgtcgccccgctcagctgggatctcccggagccccgcagccgagccagcaagatccgagtgcactcgcgaggcaacctctgggccaccggtcacttcatgggcaagaagagtctggagccttccagcccatcccattggggacagctccccacacctcccctgagggaccagcgactgcagctgagtcatgatctgctcggaatcctcctgctaaagaaggctctgggcgtgagcctcagccgccccgcaccccaaatccagtacaggaggctgctggtacaaatactgcagaaatgacaccaataataggggcagacacaacagcgtggcttagattgtgcccacccagggaaggtgctgaatgggaccctgttgatggccccatctggatgtaaatcctgagctcaaatctctgttactccattactgtgatttctggctgggtcaccagaaatatcgctgatgcagacacagattatgttcctgctgtatttcctgcttccctgttgaattggtgaataaaaccttgctcttt

SEQ ID NO: 78 - DNA, 1829 bp, Homo sapiens
gggattcgggcctgggactgtgtctgtcgcccatggccgccgcgctgctcgcccgggcctcgggccctgcccgcagagctctctgtcctagggcctggcggcagttacacaccatctaccagtctgtggaactgcccgagacacaccagatgttgctccagacatgccgggactttgccgagaaggagttgtttcccattgcagcccaggtggataaggaacatctcttcccagcggctcaggtgaagaagatgggcgggcttgggcttctggccatggacgtgcccgaggagcttggcggtgctggcctcgattacctggcctacgccatcgccatggaggagatcagccgtggctgcgcctccaccggagtcatcatgagtgtcaacaactctctctacctggggcccatcttgaagtttggctccaaggagcagaagcaggcgtgggtcacgcctttcaccagtggtgacaaaattggctgctttgccctcagcgaaccagggaacggcagtgatgcaggagctgcgtccaccaccgcccgggccgagggcgactcatgggttctgaatggaaccaaagcctggatcaccaatgcctgggaggcttcggctgccgtggtctttgccagcacggacagagccctgcaaaacaagggcatcagtgccttcctggtccccatgccaacgcctgggctcacgttggggaagaaagaagacaagctgggcatccggggctcatccacggccaacctcatctttgaggactgtcgcatccccaaggacagcatcctgggggagccagggatgggcttcaagatagccatgcaaaccctggacatgggccgcatcggcatcgcctcccaggccctgggcattgcccagaccgccctcgattgtgctgtgaactacgctgagaatcgcatggccttcggggcgcccctcaccaagctccaggtcatccagttcaagttggcagacatggccctggccctggagagtgcccggctgctgacctggcgcgctgccatgctgaaggataacaagaagcctttcatcaaggaggcagccatggccaagctggccgcctcggaggccgcgaccgccatcagccaccaggccatccagatcctgggcggcatgggctacgtgacagagatgccggcagagcggcactaccgcgacgcccgcatcactgagatctacgagggcaccagcgaaatccagcggctggtgatcgccgggcatctgctcaggagctaccggagctgagcccgcggcggactgccccaggactgcgggaaggcgcgggagccaggggcctccaccccaaccccggctcagagactgggcggcccggcgggggctccctggggaccccagatgggctcagtgctgccacccagatcagatcacatgggaatgaggccctccgaccattggcagctccgcctctgggcctttccgcctcctcaccactgtgcctcaagttcctcatctaagtggccctggctcctgggggcggggttgtgggggggctgagcgacactcagggacacctcagttgtcctcccgcgggccctggtgccctggcatgaaggcccagtgcgacaggcccttggtggggtctgtcttttccttgaggtcagaggtcaggagcagggctggggtcaggatgacgaggcctggggtcctggtgttgggcaggtggtggggctgggccatggagctggcccagaggcccctcagccctttgtaaagtctgatgaaggcaggggtggtgattcatgctgtgtgactgactgtgggtaataaacacacctgtccccc

SEQ ID NO: 79 - DNA, 3321 bp, Homo sapiens
atgaagattttgatacttggtatttttctgtttttatgtagtaccccagcctgggcgaaagaaaagcattattacattggaattattgaaacgacttgggattatgcctctgaccatggggaaaagaaacttatttctgttgacacggaacattccaatatctatcttcaaaatggcccagatagaattgggagactatataagaaggccctttatcttcagtacacagatgaaacctttaggacaactatagaaaaaccggtctggcttgggtttttaggccctattatcaaagctgaaactggagataaagtttatgtacacttaaaaaaccttgcctctaggccctacacctttcattcacatggaataacttactataaggaacatgagggggccatctaccctgataacaccacagattttcaaagagcagatgacaaagtatatccaggagagcagtatacatacatgttgcttgccactgaagaacaaagtcctggggaaggagatggcaattgtgtgactaggatttaccattcccacattgatgctccaaaagatattgcctcaggactcatcggacctttaataatctgtaaaaaagattctctagataaagaaaaagaaaaacatattgaccgagaatttgtggtgatgttttctgtggtggatgaaaatttcagctggtacctagaagacaacattaaaacctactgctcagaaccagagaaagttgacaaagacaacgaagacttccaggagagtaacagaatgtattctgtgaatggatacacttttggaagtctcccaggactctccatgtgtgctgaagacagagtaaaatggtacctttttggtatgggtaatgaagttgatgtgcacgcagctttctttcacgggcaagcactgactaacaagaactaccgtattgacacaatcaacctctttcctgctaccctgtttgatgcttatatggtggcccagaaccctggagaatggatgctcagctgtcagaatctaaaccatctgaaagccggtttgcaagcctttttccaggtccaggagtgtaacaagtcttcatcaaaggataatatccgtgggaagcatgttagacactactacattgccgctgaggaaatcatctggaactatgctccctctggtatagacatcttcactaaagaaaacttaacagcacctggaagtgactcagcggtgttttttgaacaaggtaccacaagaattggaggctcttataaaaagctggtttatcgtgagtacacagatgcctccttcacaaatcgaaaggagagaggccctgaagaagagcatcttggcatcctgggtcctgtcatttgggcagaggtgggagacaccatcagagtaaccttccataacaaaggagcatatcccctcagtattgagccgattggggtgagattcaataagaacaacgagggcacatactattccccaaattacaacccccagagcagaagtgtgcctccttcagcctcccatgtggcacccacagaaacattcacctatgaatggactgtccccaaagaagtaggacccactaatgcagatcctgtgtgtctagctaagatgtattattctgctgtggatcccactaaagatatattcactgggcttattgggccaatgaaaatatgcaagaaaggaagtttacatgcaaatgggagacagaaagatgtagacaaggaattctatttgtttcctacagtatttgatgagaatgagagtttactcctggaagataatattagaatgtttacaactgcacctgatcaggtggataaggaagatgaagactttcaggaatctaataaaatgcactccatgaatggattcatgtatgggaatcagccgggtctcactatgtgcaaaggagattcggtcgtgtggtacttattcagcgccggaaatgaggccgatgtacatggaatatacttttcaggaaacacatatctgtggagaggagaacggagagacacagcaaacctcttccctcaaacaagtcttacgctccacatgtggcctgacacagaggggacttttaatgttgaatgccttacaactgatcattacacaggcggcatgaagcaaaaatatactgtgaaccaatgcaggcggcagtctgaggattccaccttctacctgggagagaggacatactatatcgcagcagtggaggtggaatgggattattccccacaaagggagtgggaaaaggagctgcatcatttacaagagcagaatgtttcaaatgcatttttagataagggagagttttacataggctcaaagtacaagaaagttgtgtatcggcagtatactgatagcacattccgtgttccagtggagagaaaagctgaagaagaacatctgggaattctaggtccacaacttcatgcagatgttggagacaaagtcaaaattatctttaaaaacatggccacaaggccctactcaatacatgcccatggggtacaaacagagagttctacagttactccaacattaccaggtgaaactctcacttacgtatggaaaatcccagaaagatctggagctggaacagaggattctgcttgtattccatgggcttattattcaactgtggatcaagttaaggacctctacagtggattaattggccccctgattgtttgtcgaagaccttacttgaaagtattcaatcccagaaggaagctggaatttgcccttctgtttctagtttttgatgagaatgaatcttggtacttagatgacaacatcaaaacatactctgatcaccccgagaaagtaaacaaagatgatgaggaattcatagaaagcaataaaatgcatgctattaatggaagaatgtttggaaacctacaaggcctcacaatgcacgtgggagatgaagtcaactggtatctgatgggaatgggcaatgaaatagacttacacactgtacattttcacggccatagcttccaatacaagcacaggggagtttatagttctgatgtctttgacattttccctggaacataccaaaccctagaaatgtttccaagaacacctggaatttggttactccactgccatgtgaccgaccacattcatgctggaatggaaaccacttacaccgttctacaaaatgaagacaccaaatctggctgaatgaaataaattggtgataagtggaaaaaagagaaaaaccaatgattcataacaatgtatgtgaaagtgtaaaatagaatgttactttggaatgactataaacattaaaagagactggagcat

SEQ ID NO: 80 - DNA, 3304 bp, Homo sapiens
gcgaccgaacgcggcggtcggcagcgttcgcgcgggggcctgcgaagcgctgctcggggccggcactgcccgcggggaggacgcgccgccgccgccacccagcgccgccgccgccgccgcctccagccgggccgccgcgcgtcccgggggccggccccgcgagcgcaggagtaaacaccgccggagtcttggagccgctgcagaagggaataaagagagatgcagggatttgtgaggttacggcgccccagctgcaagatgcactagccggctgaacccgggatcggctgacttgttggaaccggagtgctctgcacggagagtggtggatgagttgaagttgccttcccggggctcattttccacgctgccgagaggaatccgagaggcaaggcaatcacttcgtcttgccattgattgggtatcgggagctttttttttctcccctctctctttcttttcctccgtcttgttgcatgcaagaaaattacagtccgctgctcgcccgccctgggtgcgagatattcagccccgctctctcccgtgcattgtgcaacccaaagatgaaagaccgaaggggagaaagttaaagaaatcgcccacatgcgctggatcagtccacggcttggggaaaggcatccagagaaggtgggagcggagagtttgaagtctttacaggcgggaagatggcggactggagctgaaagtgttgattgggaaacttgggtgattcttgtgtttatttacaatcctcttgacccaggcaggacacatgcaggccaaaaaacgctatttcatcctgctctcagctggctcttgtctcgcccttttgttttatttcggaggcttgcagtttagggcatcgaggagccacagccggagagaagaacacagcggtaggaatggcttgcaccaccccagtccggatcatttctggccccgcttcccggagcctctgcgccccttcgttccttgggatcaattggaaaacgaggattccagcgtgcacatttccccccggcagaagcgagatgccaactccagcatctacaaaggcaagaagtgccgcatggagtcctgcttcgatttcaccctttgcaagaaaaacggcttcaaagtctacgtatacccacagcaaaaaggggagaaaatcgccgaaagttaccaaaacattctagcggccatcgagggctccaggttctacacctcggaccccagccaggcgtgcctctttgtcctgagtctggatactttagacagagaccagttgtcacctcagtatgtgcacaatttgagatccaaagtgcagagtctccacttgtggaacaatggtaggaatcatttaatttttaatttatattccggcacttggcctgactacaccgaggacgtggggtttgacatcggccaggcgatgctggccaaagccagcatcagtactgaaaacttccgacccaactttgatgtttctattcccctcttttctaaggatcatcccaggacaggaggggagagggggtttttgaagttcaacaccatccctcctctcaggaagtacatgctggtattcaaggggaagaggtacctgacagggataggatcagacaccaggaatgccttatatcacgtccataacggggaggacgttgtgctcctcaccacctgcaagcatggcaaagactggcaaaagcacaaggattctcgctgtgacagagacaacaccgagtatgagaagtatgattatcgggaaatgctgcacaatgccactttctgtctggttcctcgtggtcgcaggcttgggtccttcagattcctggaggctttgcaggctgcctgcgtccctgtgatgctcagcaatggatgggagttgccattctctgaagtgattaattggaaccaagctgccgtcataggcgatgagagattgttattacagattccttctacaatcaggtctattcatcaggataaaatcctagcacttagacagcagacacaattcttgtgggaggcttatttttcttcagttgagaagattgtattaactacactagagattattcaggacagaatattcaagcacatatcacgtaacagtttaatatggaacaaacatcctggaggattgttcgtactaccacagtattcatcttatctgggagattttccttactactatgctaatttaggtttaaagcccccctccaaattcactgcagtcatccatgcggtgacccccctggtctctcagtcccagccagtgttgaagcttctcgtggctgcagccaagtcccagtactgtgcccagatcatagttctatggaattgtgacaagcccctaccagccaaacaccgctggcctgccactgctgtgcctgtcgtcgtcattgaaggagagagcaaggttatgagcagccgttttctgccctacgacaacatcatcacagacgccgtgctcagccttgacgaggacacggtgctttcaacaacagaggtggatttcgccttcacagtgtggcagagcttccctgagaggattgtggggtaccccgcgcgcagccacttctgggataactctaaggagcggtggggatacacatcaaagtggacgaacgactactccatggtgttgacaggagctgctatttaccacaaatattatcactacctatactcccattacctgccagccagcctgaagaacatggtggaccaattggccaattgtgaggacattctcatgaacttcctggtgtctgctgtgacaaaattgcctccaatcaaagtgacccagaagaagcagtataaggagacaatgatgggacagacttctcgggcttcccgttgggctgaccctgaccactttgcccagcgacagagctgcatgaatacgtttgccagctggtttggctacatgccgctgatccactctcagatgaggctcgaccccgtcctctttaaagaccaggtctctattttgaggaagaaataccgagacattgagcgactttgaggaatccggctgagtgggggaggggaagcaagaagggatgggggtcaagctgctctctcttcccagtgcagatccactcatcagcagagccagattgtgccaactatccaaaaacttagatgagcagaatgacaaaaaaaaaaaaggccaatgagaactcaactcctggctcctgggactgcaccagactgctccaaactcacctcactggcttctgtgtcccaagactaggttggtacagtttaattatggaacattaaataattatttttgaaaaaaaaaaaaaaaaaa

SEQ ID NO: 81 - DNA, 2913 bp, Homo sapiens
gtcccagctagagctccagcgcccgctcaggccccactcgaccctctcgggcctcggctacttggactgcggcggaatatggcggctccgatgactcccgcggctcggcccgaggactacgaggcggcgctcaatgccgccctggctgacgtgcccgaactggccagactcctggagatcgacccgtacttgaagccctacgccgtggacttccagcgcaggtataagcagtttagccaaattttgaagaacattggagaaaatgaaggtggtattgataagttttccagaggctatgaatcatttggcgtccacagatgtgctgatggtggtttatactccaaagaatgggccccgggagcagaaggagtttttcttactggagattttaatggttggaatccattttcgtacccatacaaaaaactggattatggaaaatgggagctgtatatcccaccaaagcagaataaatctgtactcgtgcctcatggatccaaattaaaggtagttattactagtaaaagcggagagatcttgtatcgtatttcaccgtgggcaaagtatgtggttcgtgaaggtgataatgtgaattatgattggatacactgggatccagaacactcatatgagtttaagcattccagaccaaagaagccacggagtctaagaatttatgaatctcatgtgggaatttcttcccatgaaggaaaagtagcttcttataaacattttacatgcaatgtactaccaagaatcaaaggccttggatacaactgcattcagttgatggcaatcatggagcatgcttactatgccagctttggttaccaaatcacaagcttctttgcagcttccagccgttatggaacacctgaagagctacaagaactggtagacacagctcattccatgggtatcatagtcctcttagatgtggtacacagccatgcttcaaaaaattcagcagatggattgaatatgtttgatgggacagattcctgttattttcattctggacctagagggactcatgatctttgggatagcagattgtttgcctactccagctgggaagttttaagattccttctgtcaaacataagatggtggttggaagaatatcgctttgatggatttcgttttgatggtgttacgtccatgctttatcatcaccatggagtgggtcaaggtttctcaggtgattacagtgaatatttcggactacaagtagatgaagatgccttgacttacctcatgttggcaaatcatttggttcacacgctgtgtcccgattctataacaatagctgaggatgtatcaggaatgccagctctgtgctctccaatttcccagggagggggtggttttgactatcgactagccatggcaattccagataagtggattcagctacttaaagagtttaaagatgaagactggaacatgggcgatatagtatacacgctcacaaacaggcgctaccttgaaaagtgcattgcttatgcagagagccatgatcaggcattggttggggataagtcgctggcattttggttgatggatgccgaaatgtatacaaacatgagtgtcctgactccttttactccagttattgatcgtggaatacagcttcataaaatgattcgactcattacgcatgggcttggtggagaaggctatctcaatttcatgggtaatgaatttgggcatcctgaatggttagacttcccaagaaaaggaaataatgagagttaccattatgccaggcggcagtttcatttaactgacgacgaccttcttcgctacaagttcctaaataattttgacagggatatgaatagattggaagaaagatatggttggcttgcagctccacaggcctacgtgagtgaaaaacatgaaggcaataagatcattgcttttgaaagagcaggtcttcttttcattttcaacttccatccaagcaagagctacactgactaccgagttggaacagcattgccagggaaattcaaaattgtgctagattcagatgcagcggaatatggagggcatcagagactggaccacagcactgactttttttctgaggcttttgaacataatgggcgtccctattctcttttggtgtacattccaagcagagtggccctcatccttcagaatgtggatctgccgaattgaagaggcctgatttcagctccaccagatgcagatttgtgttttgttttcttgttatcactgtcacacagcttataacatgtatgcttttcagaatacagttgtctagccaagccatcaagtgtctgaaattcaatattggtttatgcaaatacagcaaacttttatttaagtagataggagaatatgtttaaaatattaggaatcctagaccatattttcaagtcatcttagcagctaggattctcaaatggaagtgttatatataatatgttaaaaacattttgctttcctggctaattatttgatccttttaaatccaaatttgaatcatttgtcatgtatgattatttctgttaaatgtacacagtatttaagatggatatttggtggctctatttgttctgatatcttttggtctaaattatgaggtaccaagattgtttctttgtttctttttttcaaattgtgtttagaaatactgtaataaatatgcagtagtgatataaagaattatatccaaggtaatataaaagccattacgtatgaactcatccgtgtctcattttgtgttttattttgtgatctcttgtccactaagtatcttgttaaatgccagtatctcagtctttctgaagccctgaaatggtaattgtagcatttcagaaaatgtctttcatttcaatcaataaaaagcttttgtaaaaaaaaaaaaaaaaaaaaaaaaaa

SEQ ID NO: 82 - DNA, 1412 bp, Homo sapiens
cggggtcgtccgcaaagcctgagtcctgtcctttctctctccccggacagcatgagcttcaccactcgctccaccttctccaccaactaccggtccctgggctctgtccaggcgcccagctacggcgcccggccggtcagcagcgcggccagcgtctatgcaggcgctgggggctctggttcccggatctccgtgtcccgctccaccagcttcaggggcggcatggggtccgggggcctggccaccgggatagccgggggtctggcaggaatgggaggcatccagaacgagaaggagaccatgcaaagcctgaacgaccgcctggcctcttacctggacagagtgaggagcctggagaccgagaaccggaggctggagagcaaaatccgggagcacttggagaagaagggaccccaggtcagagactggagccattacttcaagatcatcgaggacctgagggctcagatcttcgcaaatactgtggacaatgcccgcatcgttctgcagattgacaatgcccgtcttgctgctgatgactttagagtcaagtatgagacagagctggccatgcgccagtctgtggagaacgacatccatgggctccgcaaggtcattgatgacaccaatatcacacgactgcagctggagacagagatcgaggctctcaaggaggagctgctcttcatgaagaagaaccacgaagaggaagtaaaaggcctacaagcccagattgccagctctgggttgaccgtggaggtagatgcccccaaatctcaggacctcgccaagatcatggcagacatccgggcccaatatgacgagctggctcggaagaaccgagaggagctagacaagtactggtctcagcagattgaggagagcaccacagtggtcaccacacagtctgctgaggttggagctgctgagacgacgctcacagagctgagacgtacagtccagtccttggagatcgacctggactccatgagaaatctgaaggccagcttggagaacagcctgagggaggtggaggcccgctacgccctacagatggagcagctcaacgggatcctgctgcaccttgagtcagagctggcacagacccgggcagagggacagcgccaggcccaggagtatgaggccctgctgaacatcaaggtcaagctggaggctgagatcgccacctaccgccgcctgctggaagatggcgaggactttaatcttggtgatgccttggacagcagcaactccatgcaaaccatccaaaagaccaccacccgccggatagtggatggcaaagtggtgtctgagaccaatgacaccaaagttctgaggcattaagccagcagaagcagggtaccctttggggagcaggaggccaataaaaagttcagagttcattggatgtc

SEQ ID NO: 83 - DNA, 2609 bp, Homo sapiens
cgcccgggcaggtctcccttcaaacgtggcgtcgtgggttgtttgcgcctcgcctggggtcagcgagcaaggacgggcgcgggcggggatactcaaagccaacagctggagtcagccctcgtgtcccgggctcacagtggcacgactgaatcctcagagtcggctggcttttgagctctcacgattggggaggagggggcgtttctggttcgcagctccagaggattgcgttccttcccccatacctgtcccccacagtcacgctctgccctgacgtgcagcatttgacaagttaccccctcgccacatactacttccacccacgtccgagttaactttgttcttaaccttcttgagactaccctcggcctccaggtctttttttcccagttcatttttgcccataagattgagtttcgagtttcagatatcatgcagaaagtttacctttaagactgagcacccatctgatactcttcctcccgaaaaagttcatgctcacgagagagtttgtgggaaaagtgaaagccagtacacgcaggaaactatggctgagcacggggctcacttcacagctgcttctgtggccgatgaccagccatccatctttgaggtggtagcacaggacagtttaatgacagcagtgagacccgctcttcagcatgtggtcaaggttcttgcagaatcaaatcccacccactatggcttcttgtggaggtggtttgatgaaatctttactctgctagatcttctgctccagcaacattatctgtctagaaccagtgcctcattttctgaaaacttttacggcttaaagagaattgtaatgggggacactcacaagtctcagagattggctagtgctggtctcccaaagcagcagctttggaaatctattatgttcctggttcttcttccctatctgaaagtgaagctggagaagctggtttctagcctgagagaagaggatgaatattctattcatcccccttcttcccgctggaaacgattttacagagctttcctggcagcctacccatttgtgaacatggcctgggaaggatggtttcttgtacaacaacttcgatacatcctaggaaaagctcagcatcactcaccactgctgaggctggctggagttcagctaggtcgactgacagttcaggatatacaagctctggagcacaaaccagctaaggccagcatgatgcagcaaccagccaggagtgttagtgagaagataaactcagctctgaagaaagctgttgggggtgttgccttatccctgtctactggcctttctgtgggtgtattcttcttgcagttccttgactggtggtactcatctgaaaatcaagaaaccatcaagtcattgactgccctgcctactccaccaccacctgtacacctagactataactctgattctcccctcttacccaaaatgaagactgtgtgcccactgtgtcgtaaaacccgggtgaatgatactgttcttgccacctctggctatgtgttttgttaccgctgtgtgtttcattatgtgaggagtcaccaagcttgtcccatcacaggttatccaacagaagtacaacatctgattaaactctactcccctgagaactgaaagggaatcatgtcttatcctcacaacaaaagtattgcgctgtaatgtcacagagctggtttcagcatggtattgagttgacacttctcagcctcaattcataactatatgaactttaaatgattatatggatttctttaaaaggatatgcccatttgatcctaaccttttagcctgctctctagaaccctacttacagttgaccaagctgcttaaagtagaaggatcaggactggcaggggatatgagggccagtgtagagattaaacagaataatgagtacacaagtttttgcctatccctttccttaaaatataagaaataaaggagctcttacgaaaaacccaggttagaccgcataaaaaataaagtgaacagtgaggtggtagcaagacttctttttagaaaagaaagcatttacctgcctgtctgtaaggtggaaatttcatcagtttgcaaacgataagaaatgcagacttgctcttgatagaaatgcttagaaacactctgggggggaaaaaagctccttccatatactgtgagacatttgttaagtgacatctattgtttatcagcttttaaggataaaaaaggtattttaaaagttggatatttaggatatttgaggatattcctttatgagctctccatatccttcttgagaaactggttaaaaaaggaataggggtagagtgttacagagagtagtctgaagattcctgtgtaaaagcaaagctaacaagcaatgaagacatgaagcaaaatactaatctaattgtgtaaagaaaggatattttaataagttctttctgcttgctgctaagagtttgctaaagtgtcatgaattattctggttattactaaagtttctatgaaacaagtagattttaagaataaatgtttctggaaaaggactatgttatgattttgtagaaatgtaaagattacttgaggtgtttaaaataaatttttcattcagact

SEQ ID NO: 84 - DNA, 1767 bp, Homo sapiens
aagcctccggagcgcacgtcggcagtcggctccctcgttgaccgaatcaccgacctctctccccagctgtatttccaaaatgtcgctttctaacaagctgacgctggacaagctggacgttaaagggaagcgggtcgttatgagagtcgacttcaatgttcctatgaagaacaaccagataacaaacaaccagaggattaaggctgctgtcccaagcatcaaattctgcttggacaatggagccaagtcggtagtccttatgagccacctaggccggcctgatggtgtgcccatgcctgacaagtactccttagagccagttgctgtagaactcaaatctctgctgggcaaggatgttctgttcttgaaggactgtgtaggcccagaagtggagaaagcctgtgccaacccagctgctgggtctgtcatcctgctggagaacctccgctttcatgtggaggaagaagggaagggaaaagatgcttctgggaacaaggttaaagccgagccagccaaaatagaagctttccgagcttcactttccaagctaggggatgtctatgtcaatgatgcttttggcactgctcacagagcccacagctccatggtaggagtcaatctgccacagaaggctggtgggtttttgatgaagaaggagctgaactactttgcaaaggccttggagagcccagagcgacccttcctggccatcctgggcggagctaaagttgcagacaagatccagctcatcaataatatgctggacaaagtcaatgagatgattattggtggtggaatggcttttaccttccttaaggtgctcaacaacatggagattggcacttctctgtttgatgaagagggagccaagattgtcaaagacctaatgtccaaagctgagaagaatggtgtgaagattaccttgcctgttgactttgtcactgctgacaagtttgatgagaatgccaagactggccaagccactgtggcttctggcatacctgctggctggatgggcttggactgtggtcctgaaagcagcaagaagtatgctgaggctgtcactcgggctaagcagattgtgtggaatggtcctgtgggggtatttgaatgggaagcttttgcccggggaaccaaagctctcatggatgaggtggtgaaagccacttctaggggctgcatcaccatcataggtggtggagacactgccacttgctgtgccaaatggaacacggaggataaagtcagccatgtgagcactgggggtggtgccagtttggagctcctggaaggtaaagtccttcctggggtggatgctctcagcaatatttagtactttcctgccttttagttcctgtgcacagcccctaagtcaacttagcattttctgcatctccacttggcattagctaaaaccttccatgtcaagattcagctagtggccaagagatgcagtgccaggaacccttaaacagttgcacagcatctcagctcatcttcactgcaccctggatttgcatacattcttcaagatcccatttgaattttttagtgactaaaccattgtgcattctagagtgcatatatttatattttgcctgttaaaaagaaagtgagcagtgttagcttagttctcttttgatgtaggttattatgattagctttgtcactgtttcactactcagcatggaaacaagatgaaattccatttgtaggtagtgagacaaaattgatgatccattaagtaaacaataaaagtgtccattg

SEQ ID NO: 85 - DNA, 1550 bp, Homo sapiens
gtggcctaccatggtttcaacgggtaacggggaataagggttcgattcggagctgcgggagccgggctggcaggagcaggatggcggcggcggcggctgcaggcgaggcgcgccgggtgctggtgtacggcggcaggggcgctctgggttctcgatgcgtgcaggcttttcgggcccgcaactggtgggttgccagcgttgatgtggtggagaatgaagaggccagcgctacgatcattgttaaaatgacagactcgttcactgagcaggctgaccaggtgactgctgaggttggaaagctcttgggtgaagagaaggtggatgcaattctttgcgttgctggaggatgggccgggggcaatgccaaatccaagtctctctttaagaactgtgacctgatgtggaagcagagcatatggacatcgaccatctccagccatctggctaccaagcatctcaaggaaggaggcctcctgaccttggctggcgcaaaggctgccctggatgggactcctggtatgatcgggtacggcatggccaagggtgctgttcaccagctctgccagagcctggctgggaagaacagcggcatgccgcccggggcagccgccatcgctgtgctcccggttaccctggataccccgatgaacaggaaatcaatgcctgaggctgacttcagctcctggacacccttagaattcctagttgaaactttccatgactggatcacagggaaaaaccgaccgagctcaggaagcctaatccaggtggtaaccacagaaggaaggacggaactcaccccagcatatttttaggcctcatctcagtgcctatgaggggcctgccagaaaagtcactaacctgtctcagtgtggccttgtccagccttgtgttttctgtaacccctgtttgtggtacgagataatgagtcctatttttctctcacataatatgcatttgctctcctagggacaagtgtaatacatttatgtgaagtaagacaatgcgagactggtggccgtcaaatagcatccgtcaatctgtgttaactgcataggaggctctcgatagcacctgctatagcggtgtcatgttggatcgctttgtgactgttcatctgtccttgacagtggctgtcatcttgactactttgttgatttgttggtattggggacattttaaaggctgagttatttttgaatgtcatgtttatgtcatagacgtagaaaacgcatccttgaattaaactgccttaactccttttgtggtataagcaaactacatggactctgtccctggtatccttttcctgtgtggttgcccctgtgcctgtggtctggcctaggttaagtgtgcaagataactactcgtgagttattcagaatgttgttcctaataaatgcacttgttgtctgtcttctttaatcaaatcacatcttatatacagcagtcagagatgagtatactagaatcatggattgctggaggtcttttaatctgatgttctcagaagggggtggatttaaatcctgaaataaatatttcaacac

SEQ ID NO: 86 - DNA, 3337 bp, Homo sapiens
gtcgagcctctagcccgcccgggtttccttcgcagtcgcgcaccgacgctcaaacgcgcgctccaacccgcagcctcctcctgcctcaccgcccgaagatggcggctctcaaactcctctcctccgggcttcggctctgcgcctctgcccgcggatctggggcaacctggtacaagggatgtgtttgttccttttccaccagtgctcatcgccataccaagttttatacagatccagtagaagctgtaaaagacatccctgatggtgccacggttttggttggtggttttgggctatgtggaattccagagaatcttatagatgctttactgaaaactggagtaaaaggactaactgcagtcagcaacaatgcaggggttgacaattttggtttggggcttttgcttcggtcgaagcagataaaacgcatggtctcttcatatgtgggagaaaatgcagaatttgaacgacagtacttatctggtgaattagaagtggagctgacaccacagggcacacttgcagagaggatccgtgcaggcggggctggagttcctgcattttacaccccaacagggtatgggaccctggtacaagaaggaggatcgcccatcaaatacaacaaagatggcagtgttgccattgccagtaagccaagagaggtgagggagttcaatggtcagcactttattttggaggaagcaattacaggggattttgctttggtgaaagcctggaaggcggaccgagcaggaaacgtgattttcaggaaaagtgcaaggaatttcaacttgccaatgtgcaaagctgcagaaaccacagtggtagaggttgaagaaattgtggatattggagcatttgctccagaagacatccatattcctcagatttatgtacatcgccttataaagggagaaaaatatgagaaaagaattgagcgtttatcaatccggaaagagggagatggggaagccaaatctgctaaacctggagatgacgtaagggaacgaatcatcaagagggccgctcttgagtttgaggatggcatgtatgctaatttgggcataggaatccctctcctggccagcaattttatcagcccaaatataactgttcatcttcaaagtgaaaatggagttctgggtttgggtccatatccacgacaacatgaagctgatgcagatctcatcaatgcaggcaaggaaacagttactattcttccaggagcctcttttttctccagcgatgaatcatttgcaatgattagaggtggacacgtcgatctgacaatgctaggagcgatgcaggtttccaaatatggtgacctggctaactggatgatacctgggaagatggtgaaaggaatgggaggtgctatggatttagtgtccagtgcgaaaaccaaagtggtggtcaccatggagcattctgcaaagggaaatgcacataaaatcatggagaaatgtacattaccattgactggaaagcaatgtgtcaaccgcattattactgaaaaggctgtgtttgatgtggacaagaagaaagggttgactctgattgagctctgggaaggcctgacagtggatgacgtacaaaagagtactgggtgtgattttgcagtttcaccaaaactcatgccaatgcagcagatcgcaaattgaaatatggatatttgtaccaggctgcgtgtttttcattttaaacacacaagatttaattgaaaggacatcaataatcataattgtgtatttaacaggtggttttttattagttttcttgtgtttcagactttatgcagccatataaactgttctctaggcatgctgtgacattttaataaaaagcaaaaggagcatttataattatctcatttgttaaggctgagaaggttgtttttataataggtaattatattgaatgcattttcactgaatatggtatgtatgctaaattatatgaacctttccccaagaagggccctagaaattgatgtggctttcctcttaaatattaattattagtcctgaaagaaagataacatatgtgatttttgtggttaggagagttgctgtcatgattgttttttcttcagcctcctctgacttttcttttggggcttcagattttatgattacatcttgtccccctagaacatcccccttcctcccatactgcttttaaacagatgcccaagaaggcaagcaggaatgcctcttgtgggggagggcagggagaaataactagttcaaaccaactatctatctatgctttgcaaagactaaggcgtattataggaagagggctagaaacctaactgattcttctcagttttctcattttaaaacagcccagtattcctttgtatcctcaagggtccttgagaatacttctgttattgaaaccctgtgggctacttgtactgtacctcctctcaagccaagaagggctgtgggataatttaccatgaatccttagtagcaatgacagcagagttaaaaaataaaaggtgttttactttcaggctcttgttttggttcagaggagattttaaatattgaatgacacttctacagaacaacggtttttcttctgccaaggctacttcctttaacgaagtgcctttaattcagccttatccaactagggaaaataatgttggacaagtctaggatttgaagagtcagtgaacttttagtgtcagggaataaacatggtgggtagattaggtttgaaaaaaacttccttagaggtatttattctcaatacctgacaggggcccatgggaatgacttcagaagcatcccggataatagatgggtaaaaagtctaggcaccctgaagaacaggtgagacagctggcctctggacagaggtaggcatagtacagtacgatatatcattcctctggtcctaaatatacaaacttattcatgtttttaggtgatgatggtcattgaaactcacttcttttcaggtgtagctacaattgtgtaatgtacaatattagagaaaggacaggctttttatgagtaacacacaccatatataaaacagcctttctggctgaccacatggttaaatgcataccttcccagtactggggggaaaatgacccttcttagaatgtgcaagttccatagagtaatatattgatatgattttgaaaagaattgttgatagttacatcttcaaacttatcattccagtatgcatctttaagataatgtgattctaagtagatgactttatattcttgattaaagagtgctatacatgttaagaaatgcattaaggaatacaataaatattctaaactgatgaaaaaaaaaaaaaaaaa

SEQ ID NO: 87 - DNA, 1476 bp, Homo sapiens
ggcctggcccagttgcaccacgagcgctgcggacactcggggcggcagtcggtctgtcagtcctcccgccaggtcccgcggcccgcacctgccgcccgcacctgcagctccgcacctgcggccagtgcctactgccctctcttgccgcccgcacctgcagccccgcacctgccgcttgcacctgcagccccgcgctctacccggttcaagcatggctgaccaggcgcccttcgacacggacgtcaacaccctgacccgcttcgtcatggaggagggcaggaaggcccgcggcacgggcgagttgacccagctgctcaactcgctctgcacagcagtcaaagccatctcttcggcggtgcgcaaggcgggcatcgcgcacctctatggcattgctggttctaccaacgtgacaggtgatcaagttaagaagctggacgtcctctccaacgacctggttatgaacatgttaaagtcatcctttgccacgtgtgttctcgtgtcagaagaagataaacacgccatcatagtggaaccggagaaaaggggtaaatatgtggtctgttttgatccccttgatggatcttccaacatcgattgccttgtgtccgttggaaccatttttggcatctatagaaagaaatcaactgatgagccttctgagaaggatgctctgcaaccaggccggaacctggtggcagccggctacgcactgtatggcagtgccaccatgctggtccttgccatggactgtggggtcaactgcttcatgctggacccggccatcggggagttcattttggtggacaaggatgtgaagataaaaaagaaaggtaaaatctacagccttaacgagggctacgctaaggactttgaccctgccgtcactgagtacatccagaggaagaagttcccccagataattcagctccttatggggcccggtatgtgggctccatggtggctgatgttcatcgcactctggtctacggagggatatttctgtaccccgctaacaagaagagccccaatggaaaggctgagactgctgtacgaatgcaaccccatggcctacgtcatggagaaggctgggggaatggccaccactgggaaggaggccgtgttagacgtcattcccacagacattcaccagagggcgccggtgatcttggggtcccccgacgacgtgctcgagttcctgaaggtgtatgagaagcactctgcccagtgagcacctgccctgcctgtatctggagaattgcctctacctggaccttttgtctcacacagcagtaccctgacctgctgtgcaccttacattcctagagagcagaaataaaaagcatgactatttccaccatcaaatgctgtagaatgcttggcactccctaaccaaatgctgtctccataatgccactggtgttaagatatattttgagtggatggaggagaaataaacttattcctccttaaaaaaaa

SEQ ID NO: 88 - DNA, 1722 bp, Homo sapiens; identical to SEQ ID NO: 55

SEQ ID NO: 89 - DNA, 2460 bp, Homo sapiens
aaagtcaaaccccgacaccgcggcgggccggtgagctcactagctgacccggcaggtcaggatctggcttagcggcgccgcgagctccagtgcgcgcacccgtggccgcctcccagccctctttgccggacgagctctgggccgccacaagactaaggaatggccaccccgcccaagagaagctgcccgtctttctcagccagctctgaggggacccgcatcaagaaaatctccatcgaagggaacatcgctgcagggaagtcaacatttgtgaatatccttaaacaattgtgtgaagattgggaagtggttcctgaacctgttgccagatggtgcaatgttcaaagtactcaagatgaatttgaggaacttacaatgtctcagaaaaatggtgggaatgttcttcagatgatgtatgagaaacctgaacgatggtcttttaccttccaaacatatgcctgtctcagtcgaataagagctcagcttgcctctctgaatggcaagctcaaagatgcagagaaacctgtattattttttgaacgatctgtgtatagtgacaggtatatttttgcatctaatttgtatgaatctgaatgcatgaatgagacagagtggacaatttatcaagactggcatgactggatgaataaccaatttggccaaagccttgaattggatggaatcatttatcttcaagccactccagagacatgcttacatagaatatatttacggggaagaaatgaagagcaaggcattcctcttgaatatttagagaagcttcattataaacatgaaagctggctcctgcataggacactgaaaaccaacttcgattatcttcaagaggtgcctatcttaacactggatgttaatgaagactttaaagacaaatatgaaagtctggttgaaaaggtcaaagagtttttgagtactttgtgatcttgctgaagactacaggcagccaaatggttccagatacttcagctttgtgtatcttcgtaacttcatattaatataagtttctttagaaaacccaagtttttaatcgtttttgttttaaggaaaaaagatttttaaaatgaatcttatgcaaaactttttgatcagtttcttttcttttgttttttttttaaaaaagacatttaaagacaaagacattatttctcatagcaggaaatgtagaggtagatggttccagtatcagcatagtgactaaactacattataaaagatccagcttccttctgtcattcccctcttttgtcttcctcagcaggttggcttttttccctggtgcctctcacttcgttggtgaccagtttcttaaactgaaagctttaatgttacatagtaaatggtagtgtgtcctgtgtaaattagtgtacctattaaaagttgcaaagtggaattaaaggaatccctagaataaggattctgaagttttattttaaattattatcttcttaacagtttagtcccacctcttacttcctgcctcagtctgctttctctactgtctggattaattaggcagcctgctataaagttaaagtcacacatttctattttgcaaacactgtgattactctttgctttgtagtttgctttgctttgtagggttctgcttttaagtttttctctttttcagacaaattactgataaaaatgatattgctctatatgtaatatatcctgaaagcattattttttgttgaataggaaataaaattaatgaagacagaggctagaaagcatccattaattaatgagacacacttaactacttatctctaaaccatctatgtgaatatttgtaaaaataatgaatggactcatcttagttctgtatataaatatattttctttctagtttgtttagttaaggtgtgcagtgtttttcctgtgtattaaacctttccattttacgttttagaaaattttatgtattttaaaataaggggaagagtcattttcacctttaaactactatttttctttccaagtcatttttgtttttggtttcttattcaaagatgataatttagtggattaaccagtccagacgcactgatctttgcaaaggagacttaatttcaaatctgtaattaccatacataaactgtctcattatacgtatgcatttttttagtttgtttttgtttggtataaattaatttgttaattaaatatttcttaagtataaaccttatgaactacagtggagctacactcattgaaatgtaatttcagttctaaaaagatgtaataatcattttagaattaaaatttattctacttttaaataaattatgaatattaaaggtgaaaattgtataaattactttgattccattttaagtggagacatatttcagtgatttttagtaacctttaaaaatgtataatgacttttaaaatttgtagaattgaaaagacgctaataaaaatttattattt

SEQ ID NO: 90 - DNA, 1266 bp, Homo sapiens
ctcggaagcccgtcaccatgtcgtgcgagtcgtctatggttctcgggtactgggatattcgtgggctggcgcacgccatccgcctgctcctggagttcacggatacctcttatgaggagaaacggtacacgtgcggggaagctcctgactatgatcgaagccaatggctggatgtgaaattcaagctagacctggactttcctaatctgccctacctcctggatgggaagaacaagatcacccagagcaatgccatcttgcgctacatcgctcgcaagcacaacatgtgtggtgagactgaagaagaaaagattcgagtggacatcatagagaaccaagtaatggatttccgcacacaactgataaggctctgttacagctctgaccacgaaaaactgaagcctcagtacttggaagagctacctggacaactgaaacaattctccatgtttctgtggaaattctcatggtttgccggggaaaagctcacctttgtggattttctcacctatgatatcttggatcagaaccgtatatttgaccccaagtgcctggatgagttcccaaacctgaaggctttcatgtgccgttttgaggctttggagaaaatcgctgcctacttacagtctgatcagttctgcaagatgcccatcaacaacaagatggcccagtggggcaacaagcctgtatgctgagcaggaggcagacttgcagagcttgttttgtttcatcctgtccgtaaggggtcagcgctcttgctttgctcttttcaatgaatagcacttatgttactggtgtccagctgagtttctcttgggtataaaggctaaaagggaaaaaggatatgtggagaatcatcaagatatgaattgaatcgctgcgatactgtggcatttccctactccccaactgagttcaagggctgtaggttcatgcccaagccctgagagtgggtactagaaaaaacgagattgcacagttggagagagcaggtgtgttaaatggactggagtccctgtgaagactgggtgaggataacacaagtaaaactgtggtactgatggacttaaccggagttcggaaaccgtcctgtgtacacatgggagtttagtgtgataaaggcagtatttcagactggtgggctagccaatagagttggcaattgcttattgaaactcattaaaaataatagagccccacttgacactattcactaaaattaatctggaatttaaggcccaacattaaacacaaagctgtattgat

SEQ ID NO: 91 - DNA, 888 bp, Homo sapiens
aagacggaggtcctctttccttgcctaacgcagccatggctcgtggtcccaagaagcatctgaagcgggtggcagctccaaagcattggatgctggataaattgaccggtgtgtttgctcctcgtccatccaccggtccccacaagttgagagagtgtctccccctcatcattttcctgaggaacagacttaagtatgccctgacaggagatgaagtaaagaagatttgcatgcagcggttcattaaaatcgatggcaaggtccgaactgatataacctaccctgctggattcatggatgtcatcagcattgacaagacgggagagaatttccgtctgatctatgacaccaagggtcgctttgctgtacatcgtattacacctgaggaggccaagtacaagttgtgcaaagtgagaaagatctttgtgggcacaaaaggaatccctcatctggtgactcatgatgcccgcaccatccgctaccccgatcccctcatcaaggtgaatgataccattcagattgatttggagactggcaagattactgatttcatcaagttcgacactggtaacctgtgtatggtgactggaggtgctaacctaggaagaattggtgtgatcaccaacagagagaggcaccctggatcttttgacgtggttcacgtgaaagatgccaatggcaacagctttgccactcgactttccaacatttttgttattggcaagggcaacaaaccatggatttctcttccccgaggaaagggtatccgcctcaccattgctgaagagagagacaaaagactggcggccaaacagagcagtgggtgaaatgggtccctgggtgacatgtcagatctttgtacgtaattaaaaatattgtggcaggatt

SEQ ID NO: 92 - DNA, 1449 bp, Homo sapiens
ctggatagaacagctcaagccttgccacttcgggcttctcactgcagctgggcttggacttcggagttttgccattgccagtgggacgtctgagactttctccttcaagtacttggcagatcactctcttagcagggtctgcgcttcgcagccgggatgaagctggtttccgtcgccctgatgtacctgggttcgctcgccttcctaggcgctgacaccgctcggttggatgtcgcgtcggagtttcgaaagaagtggaataagtgggctctgagtcgtgggaagagggaactgcggatgtccagcagctaccccaccgggctcgctgacgtgaaggccgggcctgcccagacccttattcggccccaggacatgaagggtgcctctcgaagccccgaagacagcagtccggatgccgcccgcatccgagtcaagcgctaccgccagagcatgaacaacttccagggcctccggagctttggctgccgcttcgggacgtgcacggtgcagaagctggcacaccagatctaccagttcacagataaggacaaggacaacgtcgcccccaggagcaagatcagcccccagggctacggccgccggcgccggcgctccctgcccgaggccggcccgggtcggactctggtgtcttctaagccacaagcacacggggctccagcccccccgagtggaagtgctccccactttctttaggatttaggcgcccatggtacaaggaatagtcgcgcaagcatcccgctggtgcctcccgggacgaaggacttcccgagcggtgtggggaccgggctctgacagccctgcggagaccctgagtccgggaggcaccgtccggcggcgagctctggctttgcaagggcccctccttctgggggcttcgcttccttagccttgctcaggtgcaagtgccccagggggcggggtgcagaagaatccgagtgtttgccaggcttaaggagaggagaaactgagaaatgaatgctgagacccccggagcaggggtctgagccacagccgtgctcgcccacaaactgatttctcacggcgtgtcaccccaccagggcgcaagcctcactattacttgaactttccaaaacctaaagaggaaaagtgcaatgcgtgttgtacatacagaggtaactatcaatatttaagtttgttgctgtcaagattttttttgtaacttcaaatatagagatatttttgtacgttatatattgtattaagggcattttaaaagcaattatattgtcctcccctattttaagacgtgaatgtctcagcgaggtgtaaagttgttcgccgcgtggaatgtgagtgtgtttgtgtgcatgaaagagaaagactgattacctcctgtgtggaagaaggaaacaccgagtctctgtataatctatttacataaaatgggtgatatgcgaacagcaaacc

SEQ ID NO: 93 - DNA, 1619 bp, Homo sapiens
ccgccagatttgaatcgcgggacccgttggcagaggtggcggcggcggcatgggtgccccgacgttgccccctgcctggcagccctttctcaaggaccaccgcatctctacattcaagaactggcccttcttggagggctgcgcctgcaccccggagcggatggccgaggctggcttcatccactgccccactgagaacgagccagacttggcccagtgtttcttctgcttcaaggagctggaaggctgggagccagatgacgaccccatagaggaacataaaaagcattcgtccggttgcgctttcctttctgtcaagaagcagtttgaagaattaacccttggtgaatttttgaaactggacagagaaagagccaagaacaaaattgcaaaggaaaccaacaataagaagaaagaatttgaggaaactgcgaagaaagtgcgccgtgccatcgagcagctggctgccatggattgaggcctctggccggagctgcctggtcccagagtggctgcaccacttccagggtttattccctggtgccaccagccttcctgtgggccccttagcaatgtcttaggaaaggagatcaacattttcaaattagatgtttcaactgtgctcctgttttgtcttgaaagtggcaccagaggtgcttctgcctgtgcagcgggtgctgctggtaacagtggctgcttctctctctctctctcttttttgggggctcatttttgctgttttgattcccgggcttaccaggtgagaagtgagggaggaagaaggcagtgtcccttttgctagagctgacagctttgttcgcgtgggcagagccttccacagtgaatgtgtctggacctcatgttgttgaggctgtcacagtcctgagtgtggacttggcaggtgcctgttgaatctgagctgcaggttccttatctgtcacacctgtgcctcctcagaggacagtttttttgttgttgtgtttttttgttttttttttttggtagatgcatgacttgtgtgtgatgagagaatggagacagagtccctggctcctctactgtttaacaacatggctttcttattttgtttgaattgttaattcacagaatagcacaaactacaattaaaactaagcacaaagccattctaagtcattggggaaacggggtgaacttcaggtggatgaggagacagaatagagtgataggaagcgtctggcagatactccttttgccactgctgtgtgattagacaggcccagtgagccgcggggcacatgctggccgctcctccctcagaaaaaggcagtggcctaaatcctttttaaatgacttggctcgatgctgtgggggactggctgggctgctgcaggccgtgtgtctgtcagcccaaccttcacatctgtcacgttctccacacgggggagagacgcagtccgcccaggtccccgctttctttggaggcagcagctcccgcagggctgaagtctggcgtaagatgatggatttgattcgccctcctccctgtcatagagctgcagggtggattgttacagcttcgctggaaacctctggaggtcatctcggctgttcctgagaaataaaaagcctgtcatttc

SEQ ID NO: 94 - DNA, 1552 bp, Homo sapiens
gcccgtacacaccgtgtgctgggacaccccacagtcagccgcatggctcccctgtgccccagcccctggctccctctgttgatcccggcccctgctccaggcctcactgtgcaactgctgctgtcactgctgcttctgatgcctgtccatccccagaggttgccccggatgcaggaggattcccccttgggaggaggctcttctggggaagatgacccactgggcgaggaggatctgcccagtgaagaggattcacccagagaggaggatccacccggagaggaggatctacctggagaggaggatctacctggagaggaggatctacctgaagttaagcctaaatcagaagaagagggctccctgaagttagaggatctacctactgttgaggctcctggagatcctcaagaaccccagaataatgcccacagggacaaagaaggggatgaccagagtcattggcgctatggaggcgacccgccctggccccgggtgtccccagcctgcgcgggccgcttccagtccccggtggatatccgcccccagctcgccgccttctgcccggccctgcgccccctggaactcctgggcttccagctcccgccgctcccagaactgcgcctgcgcaacaatggccacagtgtgcaactgaccctgcctcctgggctagagatggctctgggtcccgggcgggagtaccgggctctgcagctgcatctgcactggggggctgcaggtcgtccgggctcggagcacactgtggaaggccaccgtttccctgccgagatccacgtggttcacctcagcaccgcctttgccagagttgacgaggccttggggcgcccgggaggcctggccgtgttggccgcctttctggaggagggcccggaagaaaacagtgcctatgagcagttgctgtctcgcttggaagaaatcgctgaggaaggctcagagactcaggtcccaggactggacatatctgcactcctgccctctgacttcagccgctacttccaatatgaggggtctctgactacaccgccctgtgcccagggtgtcatctggactgtgtttaaccagacagtgatgctgagtgctaagcagctccacaccctctctgacaccctgtggggacctggtgactctcggctacagctgaacttccgagcgacgcagcctttgaatgggcgagtgattgaggcctccttccctgctggagtggacagcagtcctcgggctgctgagccagtccagctgaattcctgcctggctgctggtgacatcctagccctggtttttggcctcctttttgctgtcaccagcgtcgcgttccttgtgcagatgagaaggcagcacagaaggggaaccaaagggggtgtgagctaccgcccagcagaggtagccgagactggagcctagaggctggatcttggagaatgtgagaagccagccagaggcatctgagggggagccggtaactgtcctgtcctgctcattatgccacttccttttaactgccaagaaattttttaaaataaatatttataat

SEQ ID NO: 95 - DNA, 1322 bp, Homo sapiens
tagcttggcacgaggctcgggtcgttgtggtgcgctgtcttcccgcttgcgtcagggacctgcccgactcagtggccgccatggcatcagatgaaggcaaactttttgttggagggctgagttttgacaccaatgagcagtcgctggagcaggtcttctcaaagtacggacagatctctgaagtggtggttgtgaaagacagggagacccagagatctcggggatttgggtttgtcacctttgagaacattgacgacgctaaggatgccatgatggccatgaatgggaagtctgtagatggacggcagatccgagtagaccaggcaggcaagtcgtcagacaaccgatcccgtgggtaccgtggtggctctgccgggggccggggcttcttccgtgggggccgaggacggggccgtgggttctctagaggaggaggggaccgaggctatggggggaaccggttcgagtccaggagtgggggctacggaggctccagagactactatagcagccggagtcagagtggtggctacagtgaccggagctcgggcgggtcctacagagacagttacgacagttacgctacacacaacgagtaaaaacccttcctgctcaagatcgtccttccaatggctgtgtgtttaaagattgtgggagcttcgctgaacgttaatgtgtagtaaatgcacctccttgtattcccactttcgtagtcatttcggttctgatcttgtcaaacccagcctgaccgcttctgacgccgggatggcctcgttactagacttttctttttaaggaagtgctgtttttttttgagggttttcaaaacattttgaaaagcatttacttttttgaccacgagccatgagttttcaaaaaaatcgggggttgtgtgggtttttggtttttgttttagtttttggttgcgttgccttttttttttagtggggttggccccatgaagtgggtgccccactcacttctctgagatcgaacggactgtgaatccgctctttgtcggaagctgagcaagctgtggcttttttccaactccgtgtgacgtttctgagtgtagtgtggtaggacccggcgggtgtgcagcaactgccctggagccccagcccctgcgtccatctgtgctgtgcgccccacagtagacgtgcagacgtccctgagaggttcttgaagatgtttatttatattgtccttttttactggaagacgtacgcatactccatcgatgttgtatttgcagtggctgaggaattcttgtacgcagttttctttggctttacgagccgattaaaagaccgtgtgaaatg

SEQ ID NO: 96 - DNA, 5701 bp, Homo sapiens
ctgcccaccatctttgtccctggcaaagtgggttttgcgcagtggcttagacctagaaaagaatcgtgacgggcaggaaaccattacaccaccacctgggctgtgctctccggctcccgccgccacccccgccctcgccttcgcctccgctccggtgcacattaaagatccaaagtcatgactgactccaagtatttcacaaccaataaaaaaggagaaatatttgaactaaaagctgaactcaacaatgaaaagaaagaaaagagaaaggaggctgtgaagaaagtgattgctgctatgaccgtggggaaggatgttagttctctctttccagacgtagtgaactgtatgcagactgacaatctggaactaaagaagcttgtgtatctctacttgatgaactacgccaagagtcagccagacatggccatcatggctgtaaacagctttgtgaaggactgtgaagatcctaatcctttgattcgagccttggcagtcagaaccatggggtgcatccgggtagacaaaattacagaatatctctgtgagccgctccgcaagtgcttgaaggatgaggatccctatgttcggaaaacagcagcagtctgcgtggcaaaactccatgatatcaatgcccaaatggtggaagatcagggatttctggattctctacgggatctcatagcagattcaaatccaatggtggtggctaatgccgtagcggcattatctgaaatcagtgagtctcacccaaacagcaacttacttgatctgaacccacagaacattaataagctgctgacagccctgaatgaatgcactgaatggggccagattttcatcctggactgcctgtctaattacaaccctaaagatgatcgggaggctcagagcatctgtgagcgggtaactccccggctatcccatgccaactcagcagtggtgctttcagcggtaaaagtcctaatgaagtttctagaattgttacctaaggattctgactactacaatatgctgctgaagaagttagcccctccacttgtcactttgctgtctggggagccagaagtgcagtatgtcgccctgaggaacatcaacttaattgtccagaaaaggcctgaaatcttgaagcaggaaatcaaagtcttctttgtgaagtacaatgatcccatctatgttaaactagagaagttggacatcatgattcgtttggcatctcaagccaacattgctcaggttctggcagaactgaaagaatatgctacagaggtggatgttgactttgttcgaaaagctgtgcgggccattggacggtgtgccatcaaggtggagcaatctgcagagcgctgtgtaagcacattgcttgatctaatccagaccaaagtgaattatgtggtccaagaagcaattgttgtcatcagggacatcttccgcaaataccccaacaagtatgaaagtatcatcgccactctgtgtgagaacttagactcgctggatgagccagatgctcgagcagctatgatttggattgtgggagaatatgctgaaagaattgacaatgcagatgagttactagaaagcttcctggagggttttcacgatgaaagcacccaggtgcagctcactctgcttactgccatagtgaagctgtttctcaagaaaccatcagaaacacaggagctagtccagcaggtcttgagtttggcaacacaggattctgataatcctgaccttcgagaccggggctatatttattggcgccttctctcaactgaccctgttacagctaaagaagtagtcttgtctgagaagccactgatctctgaggagacggaccttattgagccaactctgctggatgagctaatctgccacattggttctttggcctctgtgtatcataagcctcccaatgcttttgtggaaggaagtcatggaattcatcgtaaacacttgccaattcatcatgggagcactgatgcaggtgacagccctgttggcactaccactgcaacgaacctggaacagcctcaggttatcccctctcaaggtgatcttctaggggatcttttaaaccttgacctcggtcccccagtcaatgtgccacaggtgtcctccatgcagatgggagcagtggatctcctaggaggaggactagatagtctggtgggacaatccttcatcccatcatcggtgcctgcaacctttgctccttcacctacacctgctgtggtcagcagtggactgaatgacctgtttgaactctccacagggataggcatggcacctggtggatatgtggctcctaaggctgtctggctacctgcagtaaaggctaaaggcttggagatttccggaacatttactcaccgccaagggcacatctatatggaaatgaacttcaccaataaagctctgcagcacatgacagattttgcaatccagtttaacaaaaatagctttggtgtcatccccagcactcctctggccatccatacaccactgatgccaaaccagagcattgatgtctccctgcctctcaataccttgggcccagtcatgaagatggaacctctgaataacctccaggtggctgtgaaaaacaatatcgatgtcttctacttcagctgcctcatcccactcaatgtgctttttgtagaagatggcaaaatggagcgccaggtcttccttgcaacatggaaggatattcccaatgaaaatgaacttcagtttcagattaaggaatgtcatttaaatgctgacactgtttccagcaagttgcaaaacaacaatgtttatactattgccaagaggaatgtggaagggcaggacatgctgtaccaatccctgaagctcactaatggcatttggattttggccgaactacgtatccagccaggaaaccccaattacacgctgtcactgaagtgtagagctcctgaagtctctcaatacatctatcaggtctacgacagcattttgaaaaactaacaagactggtccagtacccttcaaccatgctgtgatcggtgcaagtcaagaactcttaactggaagaaattgtattgctgcgtagaatctgaacacactgaggccacctagcaaggtagtaactagtctaacctgtgctaacattagggcacaacctgttggatagttttagcttcctgtgaacatttgtaaccactgcttcagtcacctcccacctcttgccacctgctgctgctatctgtccttacttgtgggcttctccatgctgtgccaatggctggctttttctacaccctcttttgagtgtagtttggtattttgtaattgagagctcatttcaaaagcagaaaaagacaacaaatattaaagcaaggaaaagtgtaactgaaacactgcactttactgttttatacttttgtacatatgagaaatcaagggattagtgcaaccagtagaaggcattgaaatgactgtcattaaccacacagtcctggaggcagagatgcagttacctaccctagcttttgatgggttctcttacctgtagtagccttatccctggtcatttggattttcagtttgcttttttctttttttcccctccaaactccttttccttggccaagccttcatgcttccccctttccatattataatctcatttgattgctctgcagttgggaacggtgatcttcttgaatgatgtttcagtgtgcaaaaactatagagcctgtcagcaccaaagctgacagaagttataccttactcctttcctttcccctgaacaaacctgctaatcccactaattcaggaatttgagtagagatggggaacaagaacccagatgctgtcccctcaccccctctcctgtatttctcaggtccagttcaaatctaaaattctacttttagagttgaaacagagtaataacttatctaaccctcttttcctacaaaggagaaagataaaaggcacaaaggttaccgccaaggcccgtcagctgtgtagtggcaaagccgagaccgagtctcctaagtccccgtcagtgtggttttcaccacaggactgtctcttgtcgttttcccctaatgccttctcctgccttttctgtgcctagtttttggctcttcacatattccatattgattttgacgctctgtatattggcatcaggtggcagctgaatatcttttgaattactcgaaggtaaagccagatgccagaatgaaggtgtagccagtgtttcccatatgcccctggagccccacttattgaggccagcagaataggtgcagagatgaagtgagcttagagatgttgcaaatgctctttatcccttcagctctctgatctgctctttcttcatgatacttagtctgcagggcatattaagatcatcccagaggttcaggcagttcctgtcatctctgaaaagactgggggatatgaaatcttccccctaccccacttaatgcgttggatatgatttttcaaagaatgcttcatgcccaaaataccagcctgtttagcagtgttacactgtttgatctgcgggcacttgttgcattgcctggcacccaatattcagggtccatgactaagactggtcttctcagatgccctgcttaaatcaggggcacttcaggctccacaggcgtcatgttggactgagacctaactcactggactcagaggaggaatcgtggaaaacaagagcaaaactaccccacacccctatttcatgtctgaaataaccctgtttcataccagttgcaaagcttgtggggagcggtcccacaaagcactttcttaaaccttgagaatctccaagagaaaaatatttggggaaggagggaggaaatatgtcccttgcacaccacccctgaagcacatggcagtaggaaacagcataggattgtatgtgggaggtggataggtcggtgatgtgtggagcggaaaagcaggttggtaaagttcccttcttgggacttattcctggagtcagtggatacaagtagtgcagaaggttcacactgcaaatagtgttctcatctcaaagcaaactatcattccagaaggaaaagtgtgtcagggcaagcagacaacacaatttcctatcagaatatgtccctcaacccccgaaacaaggcttctctcagcctccccaccagtgatggataacagctcctattctcagctgacctgactgagccaacccatgaactcttcactccttggggaagccacctcccatcacacccctgagcagagttagggaggaattctacttcccataaaaggacctctcctgagaggcaaaacctgttgcctccaccacggcttccctcttggctcattccaagcttggccaaattggggaagtgggatggaggttgccctgcatcccccctcctctgcctgagtgtgtctttgtaatgtcagctggcatcatacaaagagcaggagaagcaaacacccagaactcttttgctggtcagagattccctgagtgtctgtcctcacccaagcctgctctgtgtctgtgttgtgaagcttgagactctggaaagaaatggggagggggggcaggggaaatgttgccctaagaatgcttctcattcctctgttcttattgggtcctgtttttcgggagggtgggggttgggggaagcttgaccttgtgtcttcgtcaataaactcacatttacac

SEQ ID NO: 97 - DNA, 1342 bp, Homo sapiens
cggctgtaatctcagaggcttgtttgctgagggtgcctgcgcacgtgcgacggctgctggttttgaaacatgaatctttcgctcgtcctggctgccttttgcttgggaatagcctccgctgttccaaaatttgaccaaaatttggatacaaagtggtaccagtggaaggcaacacacagaagattatatggcgcgaatgaagaaggatggaggagagcagtgtgggaaaagaatatgaaaatgattgaactgcacaatggggaatacagccaagggaaacatggcttcacaatggccatgaatgcttttcctgacatgaccaatgaagaattcaggcagatgatgggttgctttcgaaaccagaaattcaggaaggggaaagtgttccgtgagcctctgtttcttgatcttcccaaatctgtggattggagaaagaaaggctacgtgacgccagtgaagaatcagaaacagtgtggttcttgttgggcttttagtgcgactggtgctcttgaaggacagatgttccggaaaactgggaaacttgtctcactgagcgagcagaatctggtggactgttcgcgtcctcaaggcaatcagggctgcaatggtggcttcatggctagggccttccagtatgtcaaggagaacggaggcctggactctgaggaatcctatccatatgtagcagtggatgaaatctgtaagtacagacctgagaattctgttgctaatgacactggcttcacagtggtcgcacctggaaaggagaaggccctgatgaaagcagtcgcaactgtggggcccatctccgttgctatggatgcaggccattcgtccttccagttctacaaatcaggcatttattttgaaccagactgcagcagcaaaaacctggatcatggtgttctggtggttggctacggctttgaaggagcaaattcgaataacagcaagtattggctcgtcaaaaacagctggggtccagaatggggctcgaatggctatgtaaaaatagccaaagacaagaacaaccactgtggaatcgccacagcagccagctaccccaatgtgtgagctgatggatggtgaggaggaaggacttaaggacagcatgtctggggaaattttatcttgaaactgaccaaacgcttattgtgtaagataaaccagttgaatcattgaggatccaagttgagattttaattctgtgacatttttacaagggtaaaatgttaccactactttaattattgttatacacagctttatgatatcaaagactcattgcttaattctaagacttttgaattttcattttttaaaaagatgtacaaaacagttt

SEQ ID NO: 98 - DNA, 1992 bp, Homo sapiens
aaacttcccgcacgcgttacaggagccaggtcggtataagcgccacgcctcgccgcccgtcaagctgtccacatccctggcctcagcccgccacatcaccctgacctgcttacgcccagattttcttcaatcacatctgaataaatcacttgaagaaagcttatagcttcattgcaccatgtgtggcatttgggcgctgtttggcagtgatgattgcctttctgttcagtgtctgagtgctatgaagattgcacacagaggtccagatgcattccgttttgagaatgtcaatggatacaccaactgctgctttggatttcaccggttggcggtagttgacccgctgtttggaatgcagccaattcgagtgaagaaatatccgtatttgtggctctgttacaatggtgaaatctacaaccataagaagatgcaacagcattttgaatttgaataccagaccaaagtggatggtgagataatccttcatctttatgacaaaggaggaattgagcaaacaatttgtatgttggatggtgtgtttgcatttgttttactggatactgccaataagaaagtgttcctgggtagagatacatatggagtcagacctttgtttaaagcaatgacagaagatggatttttggctgtatgttcagaagctaaaggtcttgttacattgaagcactccgcgactccctttttaaaagtggagccttttcttcctggacactatgaagttttggatttaaagccaaatggcaaagttgcatccgtggaaatggttaaatatcatcactgtcgggatgtacccctgcacgccctctatgacaatgtggagaaactctttccaggttttgagatagaaactgtgaagaacaacctcaggatcctttttaataatgctgtaaagaaacgtttgatgacagacagaaggattggctgccttttatcagggggcttggactccagcttggttgctgccactctgttgaagcagctgaaagaagcccaagtacagtatcctctccagacatttgcaattggcatggaagacagccccgatttactggctgctagaaaggtggcagatcatattggaagtgaacattatgaagtcctttttaactctgaggaaggcattcaggctctggatgaagtcatattttccttggaaacttatgacattacaacagttcgtgcttcagtaggtatgtatttaatttccaagtatattcggaagaacacagatagcgtggtgatcttctctggagaaggatcagatgaacttacgcagggttacatatattttcacaaggctccttctcctgaaaaagccgaggaggagagtgagaggcttctgagggaactctatttgtttgatgttctccgcgcagatcgaactactgctgcccatggtcttgaactgagagtcccatttctagatcatcgatttttttcctattacttgtctctgccaccagaaatgagaattccaaagaatgggatagaaaaacatctcctgagagagacgtttgaggattccaatctgatacccaaagagattctctggcgaccaaaagaagccttcagtgatggaataacttcagttaagaattcctggtttaagattttacaggaatacgttgaacatcaggttgatgatgcaatgatggcaaatgcagcccagaaatttcccttcaatactcctaaaaccaaagaaggatattactaccgtcaagtctttgaacgccattacccaggccgggctgactggctgagccattactggatgcccaagtggatcaatgccactgacccttctgcccgcacgctgacccactacaagtcagctgtcaaagcttaggtggtctttatgctgtaatgtgaaagcaaatatttcttcgtgttggatggggactgtgggtagataggggaacaatgagagtcaactcaggctaacttgggtttgaaaaaaataaaattcctaaattt

SEQ ID NO: 99 - DNA, 1389 bp, Homo sapiens
cgcggacttctgccaagcaccggctcatgtgaggctcgcggcacagcgttctctgggctccccagaagccagcctttcgctcccggacccggcagcccgagcaggagccgtgggaccgggcgccagcaccctctgcggcgtgtcatgggcccgcgccgccggagccgaaagcccgaggccccgaggaggcgcagcccgagcccgaccccgacccccggcccctcccggcggggcccctccttaggcgcttcctcccatcaacacagtcggcggagacaaggttggctaaaggagatccgaaagcttcagaagagcacacacctcttgataaggaagctgcccttcagccgcctggcaagagaaatatgtgttaaattcactcgtggtgtggacttcaattggcaagcccaggccctattggccctacaagaggcagcagaagcatttctagttcatctctttgaggacgcctatctcctcaccttacatgcaggccgagttactctcttcccaaaggatgtgcaactggcccggaggatccggggccttgaggagggactcggctgagctcctgcacccagtgtttctgtcagtctttcctgctcagccaggggggatgataccggggactctccagagccatgactagatccaatggattctgcgatgctgtctggactttgctgtctctgaacagtatgtgtgtgttgctttaaatatttttcttttttttgagaaggagaagactgcatgactttcctctgtaacagaggtaatatatgagacaatcaacaccgttccaaaggcctgaaaataattttcagataaagagactccaaggttgactttagtttgtgagttactcatgtgactatttgaggattttgaaaacatcagatttgctgtggtatgggagaaaaggttatgtacttattattttagctctttctgtaatatttacattttttaccatatgtacatttgtacttttattttacacataagggaaaaaataagaccactttgagcagttgcctggaaggctgggcatttccatcatatagacctctgcccttcagagtagcctcaccattagtggcagcatcatgtaactgagtggactgtgcttgtcaacggatgtgtagcttttcagaaacttaattggggatgaatagaaaacctgtaagctttgatgttctggttacttctagtaaattcctgtcaaaatcaattcagaaattctaacttggagaatttaacattttactcttgtaaatcatagaagatgtatcataacagttcagaattttaaagtacattttcgatgcttttatgggtatttttgtagtttctttgtagagagataataaaaatcaaaatatttaatga

SEQ ID NO: 100 - DNA, 627 bp, Homo sapiens
agtctccggcgagttgttgcctgggctggacgtggttttgtctgctgcgcccgctcttcgcgctctcgtttcattttctgcagcgcgccacgaggatggcccacaagcagatctactactcggacaagtacttcgacgaacactacgagtaccggcatgttatgttacccagagaactttccaaacaagtacctaaaactcatctgatgtctgaagaggagtggaggagacttggtgtccaacagagtctaggctgggttcattacatgattcatgagccagaaccacatattcttctctttagacgacctcttccaaaagatcaacaaaaatgaagtttatctggggatcgtcaaatctttttcaaatttaatgtatatgtgtatataaggtagtattcagtgaatacttgagaaatgtacaaatctttcatccatacctgtgcatgagctgtattcttcacagcaacagagctcagttaaatgcaactgcaagtaggttactgtaagatgtttaagataaaagttcttccagtcagtttttctcttaagtgcctgtttgagtttactgaaacagtttacttttgttcaataaagtttgtatgttgcatttaaaaaaaaaaaaaaa

SEQ ID NO: 101 - DNA, 2758 bp, Homo sapiens
ctatccgcgcgcgtcgccggcccagtcctgtcgctgacgggaggatctgaagccggccgcaggtcaaagagtaaaatgaagtacattctggttactggtggtgttatatcaggaattggaaaaggaatcattgccagcagtgtgggcacaatactcaagtcatgtggtttacatgtaacttcaatcaaaattgacccctacattaacattgatgcaggaacattctctccttatgagcatggtgaggtttttgtgctggatgatggtggggaagtagaccttgacctgggtaactatgagcggttccttgacatccgcctcaccaaggacaataatctgaccactggaaagatataccagtatgtcattaacaaggaacggaaaggagattacttggggaaaactgtccaagttgtccctcatatcacagatgcaatccaggagtgggtgatgagacaggcgttaatacctgtagatgaagatggcctggaacctcaagtgtgtgttattgagcttggtggaaccgtgggggacatagaaagcatgccctttattgaggccttccgtcagttccaattcaaggtcaaaagagagaacttttgtaacatccacgtcagtctagttccccagccaagttcaacaggggaacagaagactaaacctacccagaatagtgttcgggaacttagaggacttgggctttccccagatctggttgtatgcaggtgctcaaatccacttgacacatcagtgaaggagaaaatatcaatgttctgccatgttgagcctgaacaagtgatctgtgtccacgatgtctcatccatctaccgagtccccttgttgttagaggagcaaggggttgtagattattttcttcgaagacttgaccttcctattgagaggcagccaagaaaaatgctgatgaaatggaaagagatggctgacagatatgatcgcttgctggagacctgctctattgcccttgtggcgaaatacaccgagttctcagactcctatgcctctgtcattaaggctctggagcattctgcactggccatcaaccacaaattggaaatcaagtacatagattctgcggacttggagcccatcacctcgcaagaagagcccgtgcgctaccacgaagcttggcagaagctctgtagtgctcatggagtgctggttccaggaggatttggtgttcgaggaacagaaggaaaaatccaagcaattgcctgggctcggaatcagaaaaagccttttttgggcgtgtgcttagggatgcagttggcagtggttgaattctcaagaaacgtgctgggatggcaagatgccaattctacagagtttgaccctacgaccagtcatcccgtggtcgtagacatgccagaacacaacccagggcagatgggcggaaccatgaggctgggcaagaggagaaccctgttccagaccaagaactcagtcatgaggaaactctatggagacgcagactacttggaagagaggcaccgccaccgatttgaggtgaatccagtctggaaaaagtgtttggaagaacaaggcttgaagtttgttggccaagatgttgaaggagagagaatggaaattgtggagttagaagatcatcccttttttgttggggttcagtaccaccctgagttcctgtccaggcctatcaagccctccccaccatactttggcctcctcctggcctctgtggggcggctctcacattacctccagaaaggctgcaggctctcacccagggacacctatagtgacaggagtggaagcagctcccctgactctgaaatcaccgaactgaagtttccatcaataaatcatgactgatcttgtagcggatgattcttcaagagacccttcaaacttgggtagagtttacagctctgactttacactcggctttggagactttctttaaattatgtttttattaagattattttattatgcggaaaggtatttgggaaacttgtcacttgcatgtcccatcacgtgtactggctcctctgtggtgtctgcctgttgcgtgacactctccttgcagttcttgagttgcggcagaacatcgcgatgggaaccgatggtgggtggggctgcagatgtccccatcggtcaccttgtttctcaactacctcgcatcattgcagatcgtagcgcgttgcctgtcgctttcccttggatacctagaccgttataaagtgtgccacatggacttaccgagcatggagagaggattttagctaggatttgaacacttggtgctgggaacctcagggtattgcttgccactaagccatgaaaccagagacaaaatctctatactgccctgagttggggggaattctcagtgccaactgtggctggtcctcattcaaagggacggtcagtttggtgtcaacatgaaacaccaagatgtctgtctctgaagcgtgattttaaaatccccatgcctgtgcgtgcgcttcctatttctagggctgggaaacactccttgcatcaaggggtcacttacagaacaaagaatcttttgggggaaacttcctctaaaaccctctcatatatagacagctttgactggagggtccatttttcttccaggatggtgttactgcagttgaagggcaatatgaagttactttcttaatgtgacctagcaataggcatagctacgtggcactatattctggccagactcgatgtgtactctaacttaagaaataaatcagtaaggcag

SEQ ID NO: 102 - DNA, 7680 bp, Homo sapiens
gcggacactcctctcggctcctccccggcagcggcggcggctcggagcgggctccggggctcgggtgcagcggccagcgggcctggcggcgaggattacccggggaagtggttgtctcctggctggagccgcgagacgggcgctcagggcgcggggccggcggcggcgaacgagaggacggactctggcggccgggtcgttggccgggggagcgcgggcaccgggcgagcaggccgcgtcgcgctcaccatggtcagctactgggacaccggggtcctgctgtgcgcgctgctcagctgtctgcttctcacaggatctagttcaggttcaaaattaaaagatcctgaactgagtttaaaaggcacccagcacatcatgcaagcaggccagacactgcatctccaatgcaggggggaagcagcccataaatggtctttgcctgaaatggtgagtaaggaaagcgaaaggctgagcataactaaatctgcctgtggaagaaatggcaaacaattctgcagtactttaaccttgaacacagctcaagcaaaccacactggcttctacagctgcaaatatctagctgtacctacttcaaagaagaaggaaacagaatctgcaatctatatatttattagtgatacaggtagacctttcgtagagatgtacagtgaaatccccgaaattatacacatgactgaaggaagggagctcgtcattccctgccgggttacgtcacctaacatcactgttactttaaaaaagtttccacttgacactttgatccctgatggaaaacgcataatctgggacagtagaaagggcttcatcatatcaaatgcaacgtacaaagaaatagggcttctgacctgtgaagcaacagtcaatgggcatttgtataagacaaactatctcacacatcgacaaaccaatacaatcatagatgtccaaataagcacaccacgcccagtcaaattacttagaggccatactcttgtcctcaattgtactgctaccactcccttgaacacgagagttcaaatgacctggagttaccctgatgaaaaaaataagagagcttccgtaaggcgacgaattgaccaaagcaattcccatgccaacatattctacagtgttcttactattgacaaaatgcagaacaaagacaaaggactttatacttgtcgtgtaaggagtggaccatcattcaaatctgttaacacctcagtgcatatatatgataaagcattcatcactgtgaaacatcgaaaacagcaggtgcttgaaaccgtagctggcaagcggtcttaccggctctctatgaaagtgaaggcatttccctcgccggaagttgtatggttaaaagatgggttacctgcgactgagaaatctgctcgctatttgactcgtggctactcgttaattatcaaggacgtaactgaagaggatgcagggaattatacaatcttgctgagcataaaacagtcaaatgtgtttaaaaacctcactgccactctaattgtcaatgtgaaaccccagatttacgaaaaggccgtgtcatcgtttccagacccggctctctacccactgggcagcagacaaatcctgacttgtaccgcatatggtatccctcaacctacaatcaagtggttctggcacccctgtaaccataatcattccgaagcaaggtgtgacttttgttccaataatgaagagtcctttatcctggatgctgacagcaacatgggaaacagaattgagagcatcactcagcgcatggcaataatagaaggaaagaataagatggctagcaccttggttgtggctgactctagaatttctggaatctacatttgcatagcttccaataaagttgggactgtgggaagaaacataagcttttatatcacagatgtgccaaatgggtttcatgttaacttggaaaaaatgccgacggaaggagaggacctgaaactgtcttgcacagttaacaagttcttatacagagacgttacttggattttactgcggacagttaataacagaacaatgcactacagtattagcaagcaaaaaatggccatcactaaggagcactccatcactcttaatcttaccatcatgaatgtttccctgcaagattcaggcacctatgcctgcagagccaggaatgtatacacaggggaagaaatcctccagaagaaagaaattacaatcagagatcaggaagcaccatacctcctgcgaaacctcagtgatcacacagtggccatcagcagttccaccactttagactgtcatgctaatggtgtccccgagcctcagatcacttggtttaaaaacaaccacaaaatacaacaagagcctggaattattttaggaccaggaagcagcacgctgtttattgaaagagtcacagaagaggatgaaggtgtctatcactgcaaagccaccaaccagaagggctctgtggaaagttcagcatacctcactgttcaaggaacctcggacaagtctaatctggagctgatcactctaacatgcacctgtgtggctgcgactctcttctggctcctattaaccctccttatccgaaaaatgaaaaggtcttcttctgaaataaagactgactacctatcaattataatggacccagatgaagttcctttggatgagcagtgtgagcggctcccttatgatgccagcaagtgggagtttgcccgggagagacttaaactgggcaaatcacttggaagaggggcttttggaaaagtggttcaagcatcagcatttggcattaagaaatcacctacgtgccggactgtggctgtgaaaatgctgaaagagggggccacggccagcgagtacaaagctctgatgactgagctaaaaatcttgacccacattggccaccatctgaacgtggttaacctgctgggagcctgcaccaagcaaggagggcctctgatggtgattgttgaatactgcaaatatggaaatctctccaactacctcaagagcaaacgtgacttattttttctcaacaaggatgcagcactacacatggagcctaagaaagaaaaaatggagccaggcctggaacaaggcaagaaaccaagactagatagcgtcaccagcagcgaaagctttgcgagctccggctttcaggaagataaaagtctgagtgatgttgaggaagaggaggattctgacggtttctacaaggagcccatcactatggaagatctgatttcttacagttttcaagtggccagaggcatggagttcctgtcttccagaaagtgcattcatcgggacctggcagcgagaaacattcttttatctgagaacaacgtggtgaagatttgtgattttggccttgcccgggatatttataagaaccccgattatgtgagaaaaggagatactcgacttcctctgaaatggatggctcccgaatctatctttgacaaaatctacagcaccaagagcgacgtgtggtcttacggagtattgctgtgggaaatcttctccttaggtgggtctccatacccaggagtacaaatggatgaggacttttgcagtcgcctgagggaaggcatgaggatgagagctcctgagtactctactcctgaaatctatcagatcatgctggactgctggcacagagacccaaaagaaaggccaagatttgcagaacttgtggaaaaactaggtgatttgcttcaagcaaatgtacaacaggatggtaaagactacatcccaatcaatgccatactgacaggaaatagtgggtttacatactcaactcctgccttctctgaggacttcttcaaggaaagtatttcagctccgaagtttaattcaggaagctctgatgatgtcagatatgtaaatgctttcaagttcatgagcctggaaagaatcaaaacctttgaagaacttttaccgaatgccacctccatgtttgatgactaccagggcgacagcagcactctgttggcctctcccatgctgaagcgcttcacctggactgacagcaaacccaaggcctcgctcaagattgacttgagagtaaccagtaaaagtaaggagtcggggctgtctgatgtcagcaggcccagtttctgccattccagctgtgggcacgtcagcgaaggcaagcgcaggttcacctacgaccacgctgagctggaaaggaaaatcgcgtgctgctccccgcccccagactacaactcggtggtcctgtactccaccccacccatctagagtttgacacgaagccttatttctagaagcacatgtgtatttatacccccaggaaactagcttttgccagtattatgcatatataagtttacacctttatctttccatgggagccagctgctttttgtgatttttttaatagtgctttttttttttgactaacaagaatgtaactccagatagagaaatagtgacaagtgaagaacactactgctaaatcctcatgttactcagtgttagagaaatccttcctaaacccaatgacttccctgctccaacccccgccacctcagggcacgcaggaccagtttgattgaggagctgcactgatcacccaatgcatcacgtaccccactgggccagccctgcagcccaaaacccagggcaacaagcccgttagccccaggggatcactggctggcctgagcaacatctcgggagtcctctagcaggcctaagacatgtgaggaggaaaaggaaaaaaagcaaaaagcaagggagaaaagagaaaccgggagaaggcatgagaaagaatttgagacgcaccatgtgggcacggagggggacggggctcagcaatgccatttcagtggcttcccagctctgacccttctacatttgagggcccagccaggagcagatggacagcgatgaggggacattttctggattctgggaggcaagaaaaggacaaatatcttttttggaactaaagcaaattttagacctttacctatggaagtggttctatgtccattctcattcgtggcatgttttgatttgtagcactgagggtggcactcaactctgagcccatacttttggctcctctagtaagatgcactgaaaacttagccagagttaggttgtctccaggccatgatggccttacactgaaaatgtcacattctattttgggtattaatatatagtccagacacttaactcaatttcttggtattattctgttttgcacagttagttgtgaaagaaagctgagaagaatgaaaatgcagtcctgaggagagttttctccatatcaaaacgagggctgatggaggaaaaaggtcaataaggtcaagggaagaccccgtctctataccaaccaaaccaattcaccaacacagttgggacccaaaacacaggaagtcagtcacgtttccttttcatttaatggggattccactatctcacactaatctgaaaggatgtggaagagcattagctggcgcatattaagcactttaagctccttgagtaaaaaggtggtatgtaatttatgcaaggtatttctccagttgggactcaggatattagttaatgagccatcactagaagaaaagcccattttcaactgctttgaaacttgcctggggtctgagcatgatgggaatagggagacagggtaggaaagggcgcctactcttcagggtctaaagatcaagtgggccttggatcgctaagctggctctgtttgatgctatttatgcaagttagggtctatgtatttaggatgcgcctactcttcagggtctaaagatcaagtgggccttggatcgctaagctggctctgtttgatgctatttatgcaagttagggtctatgtatttaggatgtctgcaccttctgcagccagtcagaagctggagaggcaacagtggattgctgcttcttggggagaagagtatgcttccttttatccatgtaatttaactgtagaacctgagctctaagtaaccgaagaatgtatgcctctgttcttatgtgccacatccttgtttaaaggctctctgtatgaagagatgggaccgtcatcagcacattccctagtgagcctactggctcctggcagcggcttttgtggaagactcactagccagaagagaggagtgggacagtcctctccaccaagatctaaatccaaacaaaagcaggctagagccagaagagaggacaaatctttgttgttcctcttctttacacatacgcaaaccacctgtgacagctggcaattttataaatcaggtaactggaaggaggttaaactcagaaaaaagaagacctcagtcaattctctacttttttttttttttttccaaatcagataatagcccagcaaatagtgataacaaataaaaccttagctgttcatgtcttgatttcaataattaattcttaatcattaagagaccataataaatactccttttcaagagaaaagcaaaaccattagaattgttactcagctccttcaaactcaggtttgtagcatacatgagtccatccatcagtcaaagaatggttccatctggagtcttaatgtagaaagaaaaatggagacttgtaataatgagctagttacaaagtgcttgttcattaaaatagcactgaaaattgaaacatgaattaactgataatattccaatcatttgccatttatgacaaaaatggttggcactaacaaagaacgagcacttcctttcagagtttctgagataatgtacgtggaacagtctgggtggaatggggctgaaaccatgtgcaagtctgtgtcttgtcagtccaagaagtgacaccgagatgttaattttagggacccgtgccttgtttcctagcccacaagaatgcaaacatcaaacagatactcgctagcctcatttaaattgattaaaggaggagtgcatctttggccgacagtggtgtaactgtgtgtgtgtgtgtgtgtgtgtgtgtgtgtgtgtgtgtgtgggtgtgggtgtatgtgtgttttgtgcataactatttaaggaaactggaattttaaagttacttttatacaaaccaagaatatatgctacagatataagacagacatggtttggtcctatatttctagtcatgatgaatgtattttgtataccatcttcatataatatacttaaaaatatttcttaattgggatttgtaatcgtaccaacttaattgataaacttggcaactgcttttatgttctgtctccttccataaatttttcaaaatactaattcaacaaagaaaaagctcttttttttcctaaaataaactcaaatttatccttgtttagagcagagaaaaattaagaaaaactttgaaatggtctcaaaaaattgctaaatattttcaatggaaaactaaatgttagtttagctgattgtatggggttttcgaacctttcactttttgtttgttttacctatttcacaactgtgtaaattgccaataattcctgtccatgaaaatgcaaattatccagtgtagatatatttgaccatcaccctatggatattggctagttttgcctttattaagcaaattcatttcagcctgaatgtctgcctatatattctctgctctttgtattctcctttgaacccgttaaaacatcctgtggcactc

SEQ ID NO: 103 - DNA, 2679 bp, Homo sapiens
gagaccaggaccatgggatgtcggcaaagctcagaggaaaaagaagcagcccggcggtcccggagaattgaccgccacctgcgctcagagagccagcggcaacgccgcgaaatcaagctgctcctgctgggcaccagcaactcaggcaagagcaccatcgtcaaacagatgaagatcatccacagcggcggcttcaacctggaggcctgcaaggagtacaagcccctcatcatctacaatgccatcgactcgctgacccgcatcatccgggccctggccgccctcaggatcgacttccacaaccccgaccgcgcctacgacgctgtgcagctctttgcgctgacgggccccgctgagagcaagggcgagatcacacccgagctgctgggtgtcatgcgacggctctgggccgacccaggggcacaggcctgcttcagccgctccagcgagtaccacctggaggacaacgcggcctactacctgaacgacctggagcgcatcgccgcagctgactatatccccactgtcgaggacatcctgcgctcccgggacatgaccacgggcattgtggagaacaagttcaccttcaaggagctcaccttcaagatggtggacgtgggggggcagaggtcagagcgcaaaaagtggatccactgcttcgagggcgtcacagccatcatcttctgtgtggagctcagcggctacgacctgaaactctacgaggataaccagacaagtcggatggcagagagcttgcgcctctttgactccatctgcaacaacaactggttcatcaacacctcactcatcctcttcctgaacaagaaggacctgctggcagagaagatccgccgcatcccgctcaccatctgctttcccgagtacaagggccagaacacgtacgaggaggccgctgtctacatccagcggcagtttgaagacctgaaccgcaacaaggagaccaaggagatctactcccacttcacctgcgccaccgacaccagtaacatccagtttgtcttcgacgcggtgacagacgtcatcatacagaacaatctcaagtacattggcctttgctgaggagctgggcccggggcgcctgcctatggtgaaacccacggggtgtcatgccccaacgcgtgctagagaggcccaatccaggggcagaaaacagggggcctaaagaatgtcccccaccccttggcctctgcctccttggccccacatttctgcaaacataaatatttacggatagattgctaggtagatagacacacacacatgcacacacacacatctggagatggcaaaatcctctaaaatgtcgaggtctcttgaagacttgagaagctgtcacaaggtcactacaagcccaacctgccccttcactttgccttcctgagttggccccactccacttgggggtctgcattggattgttagggataggcagcagggctgaggcaaggtaggccaactgcacccctgtcacctggaggagggccggctcgctgcccgagctctggcctagggaccttgccgctgaccaagagggaggaccagtgcagggtctgtgcaccttccctgctggcctgcacacagctgctcagcaccatttcattctggacctgggaccttaggagccgggtgacagcactaaccagacctccagccactcacagctctttttaaaaaacagcttcaaaatatgcagcaaaaaccaatacaacaaaacgagtggcacgatttatttcaaactaggccagctgggattccagcttttcttctactagtctgatgttttataaatcaaaacctggttttccttctctggcatttttttttgttttttgttttttggttttttttttttttttggccaaatctcgtggtgtttcgcagaaaaaaatccagaaaatttcaaatgcagttgagtattcttttttaaatgcagattttcaaaacatattttttttcaggtggtcttttttgtgtctggcttgctgagtgtaaaagttgttatctggacgatctgtctctctgctccaaagaaattttggagtgagtggcagtcctgcgccagcctcgcgggacacgtgttgtacataagcctctgcagtgtcctcttgttaatggtggggttttctgctttgtttttatttaagaaaataaacacgacatatttaaagaaggttctttcacctgggagcaaatgaacaatagctaagtgtcttggtatttaaagagtaaattatttgtggctttgctgagtgaaggaaggggagcaaggggtggtgcccctggtcccagcatgccccgcgcctgagactggctggaaatgctctgactcctgtgaaggcacagccagcgttgtggcctgagggaggccctgctgggaccctgatctgggccttcctgtcccagggcctatgggcaactgcgttgaaaggacgttcgccaagggccgtgtgtaaatacgaactgcgccatggagaggagaggcactgccggagcccttgccagatctccctccctctctctgtgcagtagctgtgtgtccgaggtcagtgtgcggaatcacagccaaggacgtgaagagatgtacgggggaaagagaagctggggattggatgaaagtcaaaggttgtctactttaagaaaataaaataccctgaatgg

SEQ ID NO: 104 - DNA, 1390 bp, Homo sapiens
gggaagtgctgttggagccgctgtggttgctgtccgcggagtggaagcgcgtgcttttgtttgtgtccctggccatggcgctgcagctctcccgggagcagggaatcaccctgcgcgggagcgccgaaatcgtggccgagttcttctcattcggcatcaacagcattttatatcagcgtggcatatatccatctgaaacctttactcgagtgcagaaatacggactcaccttgcttgtaactactgatcttgagctcataaaatacctaaataatgtggtggaacaactgaaagattggttatacaagtgttcagttcagaaactggttgtagttatctcaaatattgaaagtggtgaggtcctggaaagatggcagtttgatattgagtgtgacaagactgcaaaagatgacagtgcacccagagaaaagtctcagaaagctatccaggatgaaatccgttcagtgatcagacagatcacagctacggtgacatttctgccactgttggaagtttcttgttcatttgatctgctgatttatacagacaaagatttggttgtacctgaaaaatgggaagagtcgggaccacagtttattaccaattctgaggaagtccgccttcgttcatttactactacaatccacaaagtaaatagcatggtggcctacaaaattcctgtcaatgactgaggatgacatgaggaaaataatgtaattgtaattttgaaatgtggttttcctgaaatcaggtcatctatagttgatatgttttatttcattggttaatttttacatggagaaaaccaaaatgatacttactgaactgtgtgtaattgttcctttatttttttggtacctatttgacttaccatggagttaacatcatgaatttattgcacattgttcaaaaggaaccaggaggtttttttgtcaacattgtgatgtatattcctttgaagatagtaactgtagatggaaaaacttgtgctataaagctagatgctttcctaaatcagatgttttggtcaagtagtttgactcagtataggtagggagatatttaagtataaaatacaacaaaggaagtctaaatattcagaatctttgttaaggtcctgaaagtaactcataatctataaacaatgaaatattgctgtatagctccttttgaccttcatttcatgtatagttttccctattgaatcagtttccaattatttgactttaatttatgtaacttgaacctatgaagcaatggatatttgtactgtttaatgttctgtgatacagaactcttaaaaatgttttttcatgtgttttataaaatcaagttttaagtgaaagtgaggaaataaagttaagtttgttttaaaaaaaaaaaaaaaaaa

SEQ ID NO: 105 - DNA, 4403 bp, Homo sapiens
cgggaacgcgccgcggccgcctcctcctccccggctcccgcccgcggcggtgttggcggcggcggtggcggcggcggcggcgcttccccggcgcggagcggctttaaaaggcggcactccaccccccggcgcactcgcagctcgggcgccgcgcgagcctgtcgccgctatgcctccgcgcgcgccgcctgcgcccgggccccggccgccgccccgggccgccgccgccaccgacaccgccgcgggcgcggggggcgcggggggcgcggggggcgccggcgggcccgggttccggccgctcgcgccgcgtccctggcgctggctgctgctgctggcgctgcctgccgcctgctccgcgcccccgccgcgccccgtctacaccaaccactgggcggtgcaagtgctgggcggcccggccgaggcggaccgcgtggcggcggcgcacggctacctcaacttgggccagattggaaacctggaagattactaccatttttatcacagcaaaacctttaaaagatcaaccttgagtagcagaggccctcacaccttcctcagaatggacccccaggtgaaatggctccagcaacaggaagtgaaacgaagggtgaagagacaggtgcgaagtgacccgcaggccctttacttcaacgaccccatttggtccaacatgtggtacctgcattgtggcgacaagaacagtcgctgccggtcggaaatgaatgtccaggcagcgtggaagaggggctacacaggaaaaaacgtggtggtcaccatccttgatgatggcatagagagaaatcaccctgacctggccccaaattatgattcctacgccagctacgacgtgaacggcaatgattatgacccatctccacgatatgatgccagcaatgaaaataaacacggcactcgttgtgcgggagaagttgctgcttcagcaaacaattcctactgcatcgtgggcatagcgtacaatgccaaaataggaggcatccgcatgctggacggcgatgtcacagatgtggtcgaggcaaagtcgctgggcatcagacccaactacatcgacatttacagtgccagctgggggccggacgacgacggcaagacggtggacgggcccggccgactggctaagcaggctttcgagtatggcattaaaaagggccggcagggcctgggctccattttcgtctgggcatctgggaatggcgggagagagggggactactgctcgtgcgatggctacaccaacagcatctacaccatctccgtcagcagcgccaccgagaatggctacaagccctggtacctggaagagtgtgcctccaccctggccaccacctacagcagtggggccttttatgagcgaaaaatcgtcaccacggatctgcgtcagcgctgtaccgatggccacactgggacctcagtctctgcccccatggtggcgggcatcatcgccttggctctagaagcaaacagccagttaacctggagggacgtccagcacctgctagtgaagacatcccggccggcccacctgaaagcgagcgactggaaagtaaacggcgcgggtcataaagttagccatttctatggatttggtttggtggacgcagaagctctcgttgtggaggcaaagaagtggacagcagtgccatcgcagcacatgtgtgtggccgcctcggacaagagacccaggagcatccccttagtgcaggtgctgcggactacggccctgaccagcgcctgcgcggagcactcggaccagcgggtggtctacttggagcacgtggtggttcgcacctccatctcacacccacgccgaggagacctccagatctacctggtttctccctcgggaaccaagtctcaacttttggcaaagaggttgctggatctttccaatgaagggtttacaaactgggaattcatgactgtccactgctggggagaaaaggctgaagggcagtggaccttggaaatccaagatctgccatcccaggtccgcaacccggagaagcaagggaagttgaaagaatggagcctcatactgtatggcacagcagagcacccgtaccacaccttcagtgcccatcagtcccgctcgcggatgctggagctctcagccccagagctggagccacccaaggctgccctgtcaccctcccaggtggaagttcctgaagatgaggaagattacacagctcaatccaccccaggctctgctaatattttacagaccagtgtgtgccatccggagtgtggtgacaaaggctgtgatggccccaatgcagaccagtgcttgaactgcgtccacttcagcctggggagtgtcaagaccagcaggaagtgcgtgagtgtgtgccccttgggctactttggggacacagcagcaagacgctgtcgccggtgccacaaggggtgtgagacctgctccagcagagctgcgacgcagtgcctgtcttgccgccgcgggttctatcaccaccaggagatgaacacctgtgtgaccctctgtcctgcaggattttatgctgatgaaagtcagaaaaattgccttaaatgccacccaagctgtaaaaagtgcgtggatgaacctgagaaatgtactgtctgtaaagaaggattcagccttgcacggggcagctgcattcctgactgtgagccaggcacctactttgactcagagctgatcagatgtggggaatgccatcacacctgcggaacctgcgtggggccaggcagagaagagtgcattcactgtgcgaaaaacttccacttccacgactggaagtgtgtgccagcctgtggtgagggcttctacccagaagagatgccgggcttgccccacaaagtgtgtcgaaggtgtgacgagaactgcttgagctgtgcaggctccagcaggaactgtagcaggtgtaagacgggcttcacacagctggggacctcctgcatcaccaaccacacgtgcagcaacgctgacgagacattctgcgagatggtgaagtccaaccggctgtgcgaacggaagctcttcattcagttctgctgccgcacgtgcctcctggccgggtaagggtgcctagctgcccacagagggcaggcactcccatccatccatccgtccaccttcctccagactgtcggccagagtctgtttcaggagcggcgccctgcacctgacagctttatctccccaggagcagcatctctgagcacccaagccaggtgggtggtggctcttaaggaggtgttcctaaaatggtgatatcctctcaaatgctgcttgttggctccagtcttccgacaaactaacaggaacaaaatgaattctgggaatccacagctctggctttggagcagcttctgggaccataagtttactgaatcttcaagaccaaagcagaaaagaaaggcgcttggcatcacacatcactcttctccccgtgcttttctgcggctgtgtagtaaatctccccggcccagctggcgaaccctgggccatcctcacatgtgacaaagggccagcagtctacctgctcgttgcctgccactgagcagtctggggacggtttggtcagactataaataagataggtttgagggcataaaatgtatgaccactggggccggagtatctatttctacatagtcagctacttctgaaactgcagcagtggcttagaaagtccaattccaaagccagaccagaagattctatcccccgcagcgctctcctttgagcaagccgagctctccttgttaccgtgttctgtctgtgtcttcaggagtctcatggcctgaacgaccacctcgacctgatgcagagccttctgaggagaggcaacaggaggcattctgtggccagccaaaaggtaccccgatggccaagcaattcctctgaacaaaatgtaaagccagccatgcattgttaatcatccatcacttcccattttatggaattgcttttaaaatacatttggcctctgcccttcagaagactcgtttttaaggtggaaactcctgtgtctgtgtatattacaagcctacatgacacagttggatttattctgccaaacctgtgtaggcattttataagctacatgttctaatttttaccgatgttaattattttgacaaatatttcatatattttcattgaaatgcacagatctgcttgatcaattcccttgaatagggaagtaacatttgccttaaattttttcgacctcgtctttctccatattgtcctgctcccctgtttgacgacagtgcatttgccttgtcacctgtgagctggagagaacccagatgttgtttattgaatctacaactctgaaagagaaatcaatgaagcaagtacaatgttaaccctaaattaataaaagagttaacatccc

SEQ ID NO: 106 - DNA, 2828 bp, Homo sapiens
ttccggcggcacggacgagaagccgagcggcaaggggcggcgggatgccggggacaaggacaaagaactggagctgtctgaagaggataaacagcttcaagatgaactggtgatgctcgtggaacgactaggggagaaggatacatccctgtatcgaccagcgctggaggaattgcgaaggcagattcgttcttctacaacttccatgacttcagtgcccaagcctctcaaatttctgcgtccacactatggcaaactgaaggaaatctatgagaacatggcccctggggagaataagcgttttgctgctgacatcatctccgttttggccatgaccatgagtggggagcgtgagtgcctcaagtatcggctagtgggctcccaggaggaattggcatcatggggtcatgagtatgtcaggcatctggcaggagaagtggctaaggagtggcaggagctggatgacgcagagaaggtccagcgggagcctctgctcactctggtgaaggaaatcgtcccctataacatggcccacaatgcagagcatgaggcttgcgacctgcttatggaaattgagcaggtggacatgctggagaaggacattgatgaaaatgcatctgcaaaggtctgcctttatctcaccagttgtgtaaattacgtgcctgagcctgagaactcagccctactgcgttgtgccctgggtgtgttccgaaagtttagccgcttccctgaagctctgagattggcattgatgctcaatgacatggagttggtagaagactcttcctcctgcaaggatgtggtagtacagaaacagatggcattcatgctaggccggcatggggtgttcctggagctgagtgaagatgtcgaggagtatgaggacctgacagagatcatgtccaatgtacagctcaacagcaacttcttggccttagctcgggagctggacatcatggagcccaaggtgcctgatgacatctacaaaacccacctagagaacaacaggtttgggggcagtggctctcaggtggactctgcccgcatgaacctggcctcctcttttgtgaatggctttgtgaatgcagcttttggccaagacaagctgctaacagatgatggcaacaaatggctttacaagaacaaggaccacggaatgttgagtgcagctgcatctcttgggatgattctgctgtgggatgtggatggtggcctcacccagattgacaagtacctgtactcctctgaggactacattaagtcaggagctcttcttgcctgtggcatagtgaactctggggtccggaatgagtgtgaccctgctctggcactgctctcagactatgttctccacaacagcaacaccatgagacttggttccatctttgggctaggcttggcttatgctggctcaaatcgtgaagatgtcctaacactgctgctgcctgtgatgggagattcaaagtccagcatggaggtggcaggtgtcacagctttagcctgtggaatgatagcagtagggtcctgcaatggagatgtaacttccactatccttcagaccatcatggagaagtcagagactgagctcaaggatacttatgctcgttggcttcctcttggactgggtctcaaccacctggggaagggtgaggccatcgaggcaatcctggctgcactggaggttgtgtcagagccattccgcagttttgccaacacactggtggatgtgtgtgcatatgcaggctctgggaatgtgctgaaggtgcagcagctgctccacatttgtagcgaacactttgactccaaagagaaggaggaagacaaagacaagaaggaaaagaaagacaaggacaagaaggaagcccctgctgacatgggagcacatcagggagtggctgttctggggattgcccttattgctatgggggaggagattggtgcagagatggcattacgaacctttggccacttgctgagatatggggagcctacactccggagggctgtacctttagcactggccctcatctctgtttcaaatccacgactcaacatcctggataccctaagcaaattctctcatgatgctgatccagaagtttcctataactccatttttgccatgggcatgggcatggtgggcagtggtaccaataatgcccgtctggctgcaatgctgcgccagttagctcaatatcatgccaaggacccaaacaacctcttcatggtgcgcttggcacagggcctgacacatttagggaagggcacccttaccctctgcccctaccacagcgaccggcagcttatgagccaggtggccgtggctggactgctcactgtgcttgtctctttcctggatgttcgaaacattattctaggcaaatcacactatgtattgtatgggctggtggctgccatgcagccccgaatgctggttacgtttgatgaggagctgcggccattgccagtgtctgtccgtgtgggccaggcagtggatgtggtgggccaggctggcaagccgaagactatcacagggttccagacgcatacaaccccagtgttgttggcccacggggaacgggcagaattggccactgaggagtttcttcctgttacccccattctggaaggttttgttatcttcggaagaaccccaattatgatctctaagtgaccaccaggggctctgaactgtagctgatgttatcagcaggccatgcatcctgctgccaagggtggacacggctgcagacttctgggggaattgtcgcctcctgctcttttgttactgagtgagataaggttgttcaataaagacttttatcccc

SEQ ID NO: 107 - DNA, 1602 bp, Homo sapiens
ggaaaaagggtaccggtgaccgctactgctgccggtgtttgcgtgtggcagggagccagtcctggcgagcggggtgtgtcgcgatgccggagctggcagtgcagaaggtggtggtccaccccctggtgctgctcagtgtggtggatcatttcaaccgaatcgtcaaggttggaaaccagaagcgtgtagttggtgtgcttttggggtcatggcaaaagaaagtacttgatgtatcgaacagttttgcagttccttttgatgaagatgacaaagacgattctgtatggtttttagaccatgattatttggaaaacatgtatggaatgtttaagaaagtcaatgccagggaaagaatagttggctggtaccacacaggccctaaactacacaagaatgacattgccatcaacgaactcatgaaaagatactgtcctaattccgtattggtcatcattgatgtgaagccgaaggacctagggctgcctacagaagcgtacatttcagtggaagaagaccaagatgatggaactccaacctcgaaaacatttgaacacgtgaccagtgaaattggagcagaggaagctgaggaagttggagttgaacacttgttacgagatatcaaagacacgacggtgggcactctgtcccagcggatcacaaaccaggtccatggtttgaagggactgaactccaagcttctggatatcaggagctacctggaaaaagtcggcacaggcaagctgcccatcaaccaccagatcatctaccagctgcaggacgtcttcaacctgctgccagatgtcagcctgcaggagttcgtcaaggccttttacctgaagaccaatgaccagatggtggtagtgtacttggcctcgctgatccgttccgtggtcgccctgcacaacctcatcaacaacaagattgccaaccgggatgcagagaagaaagaagggcaggagaaagaagagagcaaaaaggataggaaagaggacaaggagaaagataaagataaggaaaagagtgatgtaaagaaagaggagaaaaaggagaaaaagtaaaacatgtattaaatagcttttttactttgtaaattaaaatcttacaaactaaatcagtgtgctgctagagggttctttttcacttgacatgcttattagaaagctgacccaacaagagctctctgcctccggtcactcttgctgtggtgctacgtggaagtgaatggagactgatctcaaatctgaactgcagctttccctcctgtgagttggggaaatgatagtcaactcagccttcagattgtatgagaaaaatgaagagaagccaccaaatattttggtactcttcattcatttatctctaaaaccaggagttgaattttcctcatcttgaaagactcttggggtctgtttctggtattttacaaaattgctaagtggaatgcatgaattgcattatgttctctggtaacacgtagagttcagacccttctgaactctgttgataataccacaccatgttctggacccatagctctggcatcctcaggggttgtgatccagctccatatattgtttaccttcaaagatacaattaaataac

SEQ ID NO: 108 - DNA, 4290 bp, Homo sapiens
agaccttctgtccaccagctgagaaggacaagggcggaaggcagctgcacagagcagggccacggccttgcacacagtccagggagcttttgtgcaggagccaggcctccccctgggtccccatgatgagagaatgggttctgctcatgtccgtgctgctctgtggcctggctggccccacacacctgttccagccaagcctggtgctggacatggccaaggtcctcttggataactactgcttcccggagaacctgctgggcatgcaggaagccatccagcaggccatcaagagccatgagattctgagcatctcagacccgcagacgctggccagtgtgctgacagccggggtgcagagctccctgaacgatcctcgcctggtcatctcctatgagcccagcacccccgagcctcccccacaagtcccagcactcaccagcctctcagaagaggaactgcttgcctggctgcaaaggggcctccgccatgaggttctggagggtaatgtgggctacctgcgggtggacagcgtcccgggccaggaggtgctgagcatgatgggggagttcctggtggcccacgtgtgggggaatctcatgggcacctccgccttagtgctggatctccggcactgcacaggaggccaggtctctggcattccctacatcatctcctacctgcacccagggaacaccatcctgcacgtggacactatctacaaccgcccctccaacaccaccacggagatctggaccttgccccaggtcctgggagaaaggtacggtgccgacaaggatgtggtggtcctcaccagcagccagaccaggggcgtggccgaggacatcgcgcacatccttaagcagatgcgcagggccatcgtggtgggcgagcggactgggggaggggccctggacctccggaagctgaggataggcgagtctgacttcttcttcacggtgcccgtgtccaggtccctggggccccttggtggaggcagccagacgtgggagggcagcggggtgctgccctgtgtggggactccggccgagcaggccctggagaaagccctggccatcctcactctgcgcagcgcccttccaggggtagtccactgcctccaggaggtcctgaaggactactacacgctggtggaccgtgtgcccaccctgctgcagcacttggccagcatggacttctccacggtggtctccgaggaagatctggtcaccaagctcaatgccggcctgcaggctgcgtctgaggatcccaggctcctggtgcgagccatcgggcccacagaaactccttcttggcccgcgcccgacgctgcagccgaagactcaccaggggtggccccagagttgcctgaggacgaggctatccggcaagcactggtggactctgtgttccaggtgtcggtgctgccaggcaatgtgggctacctgcgcttcgatagttttgctgacgcctccgtcctgggtgtgttggccccatatgtcctgcgccaggtgtgggagccgctacaggacacggagcacctcatcatggacctgcgccacaaccctggagggccatcctctgctgtgcccctgctcctgtcctacttccagggccctgaggccggccccgtgcacctcttcaccacctatgatcgccgcaccaacatcacgcaggagcacttcagccacatggagctcccgggcccacgctacagcacccaacgtggggtgtatctgctcaccagccaccgcaccgccacggccgcggaggagttcgccttccttatgcagtcgctgggctgggccacactggtaggtgagatcaccgcgggcaacctgctgcacacccgcacggtgccgctgctggacacacccgaaggcagcctcgcgctcaccgtgccggtcctcaccttcatcgacaatcacggcgaggcctggctgggtggtggagtggtgcccgatgccatcgtgctggccgaggaggccctggacaaagcccaggaagtgctggagttccaccaaagcctgggggccttggtggagggcacagggcacctgctggaggcccactatgctcggccagaggtcgtggggcagaccagtgccctcctgcgggccaagctggcccagggcgcctaccgcacagctgtggacttggagtctctggcctctcagctcacagcagacctccaggaggtgtctggggaccaccgcttgctagtgttccacagccctggcgagctggtggtagaggaagcacccccaccaccccctgctgtcccctctccagaggagctcacctaccttattgaggccctgttcaagacagaggtgctgcccggccagctgggctacctgcgttttgacgccatggctgaactggagacagtgaaggccgtggggccacagctggtgcggctggtatggcaacagctggtggacacggctgcgctggtgatcgacctgcgctacaaccctggcagctactccacggccatcccgctgctctgctcctacttctttgaggcagagccccgccagcacctgtattctgtctttgacagggccacctcaaaagtcacggaggtgtggaccttgccccaggtcgccggccagcgctacggctcacacaaggacctctacatcctgatgagccacaccagtggctctgcggccgaggcctttgcacacaccatgcaggacctgcagcgggccacggtcattggggagcccacggccggaggcgcactctctgtgggcatctaccaggtgggcagcagccccttatatgcatccatgcccacccagatggccatgagtgccaccacaggcaaggcctgggacctggctggtgtggagcccgacatcactgtgcccatgagcgaagccctttccatagcccaggacatagtggctctgcgtgccaaggtgcccacggtgctgcagacggccgggaagctggtggctgataactatgcctctgccgagctgggggccaagatggccaccaaactgagcggtctgcagagccgctactccagggtgacctcagaagtggccctagccgagatcctgggggctgacctgcagatgctctccggagacccacacctgaaggcagcccatatccctgagaatgccaaggaccgcattcctggaattgtgcccatgcagatcccttcccctgaagtatttgaagagctgatcaagttttccttccacactaacgtgcttgaggacaacattggctacttgaggtttgacatgtttggggacggtgagctgctcacccaggtctccaggctgctggtggagcacatctggaagaagatcatgcacacggatgccatgatcatcgacatgaggttcaacatcggtggccccacatcctccattcccatcttgtgctcctacttctttgatgaaggccctccagttctgctggacaagatctacagccggcctgatgactctgtcagtgaactctggacacacgcccaggttgtaggtgaacgctatggctccaagaagagcatggtcattctgaccagcagtgtgacggccggcaccgcggaggagttcacctatatcatgaagaggctgggccgggccctggtcattggggaggtgaccagtgggggctgccagccaccacagacctaccacgtggatgacaccaacctctacctcactatccccacggcccgttctgtgggggcctcggatggcagctcctgggaaggggtgggggtgacaccccatgtggttgtccctgcagaagaggctctcgccagggccaaggagatgctccagcacaaccagctgagggtgaagcggagcccaggcctgcaggaccacctgtagggaagggccccataggcagagccccagggcagacagaacctctgggacacacaccaagggcactcctgcaggtggcccggcctgaggttcccaggagcagcaaaggggcctgctgagctctggttaggttacagctggaggtgtgtatatatacacacacacacgtgtatatacacatatatatgtgtatgtatatatatgtatatatatatggctttccaataaccacctaaattttaacaaaggttccttctaagtggtagaacttggggtggtatttttaccttccttcttcatactttgctctttttcttaaatactcattaatgtgcatatatcattattttcagatgcagctatcattattccaaaatacaaaataaagaagataaaataaattatatacccgagccattaaccacaa

SEQ ID NO: 109 - DNA, 1446 bp, Homo sapiens
ctgccatttaggacaagctggatgatgatggtttgatagctccaggggttcgtgtataggagatgatgaatctgcttcatccagaatcacaatcttaaaaggcgggaactgaggcgactgtggggacatcagtgatcgtaagtctcctgggcccgttattctcagattaggtgacggagctaagacttcgagaccatctcgtcctttttgtatcgcggaaacctgaggaacgagccggcggcggtgacctgcacgagaagccaggctaactgggtgaagtaccatgcaagcatttcttaaaggtacatccatcagtactaaacccccgctgaccaaggatcgaggagtagctgccagtgcgggaagtagcggagagaacaagaaagccaaacccgttccctgggtggaaaaatatcgcccaaaatgtgtggatgaagttgctttccaggaagaagtggttgcagtgctgaaaaaatctttagaaggagcagatcttcctaatctcttgttttacggaccacctggaactggaaaaacatccactattttggcagcagctagagaactctttgggcctgaacttttccgattaagagttcttgagttaaatgcatctgatgaacgtggaatacaagtagttcgagagaaagtgaaaaattttgctcaattaactgtgtcaggaagtcgctcagatgggaagccgtgtccgccttttaagattgtgattctggatgaagcagattctatgacctcagctgctcaggcagctttaagacgtaccatggagaaggagtcgaaaaccacccgattctgtcttatctgtaactatgtcagtcgaataattgaacccctgacctctagatgttcaaaattccgcttcaagcctctgtcagataaaattcaacagcagcgattactagacattgccaagaaggaaaatgtcaaaattagtgatgagggaatagcttatcttgttaaagtgtcagaaggagacttaagaaaagccattacatttcttcaaagcgctactcgattaacaggtggaaaggagatcacagagaaagtgattacagacattgctggggtaataccagctgagaaaattgatggagtatttgctgcctgtcagagtggctcttttgacaaactagaagctgtggtcaaggatttaatagatgagggtcatgcagcaactcagctcgtcaatcaactccatgatgtggttgtagaaaataacttatctgataaacagaagtctattatcacagaaaaacttgccgaagttgacaaatgcctagcagatggtgctgatgaacatttgcaactcatcagcctttgtgcaactgtgatgcagcagttatctcagaattgttaacgtgatatatctggatggggggttttgtaaataatgaagttgtaataaaaataaaatgaccaaaagcaccg

SEQ ID NO: 110 - DNA, 2033 bp, Homo sapiens
gaattccgggactgagctcttgaagacttgggtccttggtcgcaggtggagcgacgggtctcactccattgcccaggccagagtgcgggatatttgataagaaacttcagtgaaggccgggcgcggtgctcatgcccgtaatcccagcattttcggaggccgaggcatcatggaccgatctaaagaaaactgcatttcaggacctgttaaggctacagctccagttggaggtccaaaacgtgttctcgtgactcagcaatttccttgtcagaatccattacctgtaaatagtggccaggctcagcgggtcttgtgtccttcaaattcttcccagcgcgttcctttgcaagcacaaaagcttgtctccagtcacaagccggttcagaatcagaagcagaagcaattgcaggcaaccagtgtacctcatcctgtctccaggccactgaataacacccaaaagagcaagcagcccctgccatcgcacctgaaaataatcctgaggaggaactggcatcaaaacagaaaaatgaagaatcaaaaagaggcagtggctttggaagactttgaaattggtcgccctctgggtaaaggaaagtttggtaatgtttatttggcaagagaaaagcaaagcaagtttattctggctcttaaagtgttatttaaagctcagctggagaaagccggagtggagcatcagctcagaagagaagtagaaatacagtcccaccttcggcatcctaatattcttagactgtatggttatttccatgatgctaccagagtctacctaattctggaatatgcaccacttggaacagtttatagagaacttcagaaactttcaaagtttgatgagcagagaactgctaacttatataacagaattgcaaatgccctgtcttactgtcattcgaagagagttattcatagagacattaagccagagaacttacttcttggatcagctggagagcttaaaattgcagattttgggtggtcagtacatgctccatcttccaggaggaccactctctgtggcaccctggactacctgccccctgaaatgattgaaggtcggatgcatgatgagaaggtggatctctggagccttggagttctttgctatgaatttttagttgggaagcctccttttgaggcaaacacataccaagagacctacaaaagaatatcacgggttgaattcacattccctgactttgtaacagagggagccagggacctcatttcaagactgttgaagcataatcccagccagaggccaatgctcagagaagtacttgaacacccctggatcacagcaaattcatcaaaaccatcaaattgccaaaacaaagaatcagctagcaaacagtcttaggaatcgtgcagggggagaaatccttgagccagggctgccatataacctgacaggaacatgctactgaagtttattttaccattgactgctgccctcaatctagaacgctacacaagaaatattttgtttttactcagcaggtgtgccttaacctccctattcagaaagctccacatcaataaacatgacactctgaagtgaaagtagccacgagaattgtgctacttatactggaacataatctggaggcaaggttcgactgcagtcgaaccttgcctccagattatgaaccagtataagtagcacaattctcgtggctactttcacttcagagtgtcatgtttattgatgtggagctttctgaatagggaggttaaggcacacctgctgagtaaaacaaatatttcttgtgtagcgttcttaggaatctggtgtctgtccggccccggtaggcctgttgggtttctagtcctccttaccatcatctccatatgagagtgtgaaaataggaacacgtgctctacctccatttagggatttgcttgggatacagaagaggccatgtgtctcagagctgttaagggcttatttttttaaaacattggagtcatagcatgtgtgtaaactttaaatatgcaggccttcgtggctcgag

SEQ ID NO: 111 - DNA, 5010 bp, Homo sapiens
ggcggctcgggacggaggacgcgctagtgtgagtgcgggcttctagaactacaccgaccctcgtgtcctcccttcatcctgcggggctggctggagcggccgctccggtgctgtccagcagccatagggagccgcacggggagcgggaaagcggtcgcggccccaggcggggcggccgggatggagcggggccgcgagcctgtggggaaggggctgtggcggcgcctcgagcggctgcaggttcttctgtgtggcagttcagaatgatggatcaagctagatcagcattctctaacttgtttggtggagaaccattgtcatatacccggttcagcctggctcggcaagtagatggcgataacagtcatgtggagatgaaacttgctgtagatgaagaagaaaatgctgacaataacacaaaggccaatgtcacaaaaccaaaaaggtgtagtggaagtatctgctatgggactattgctgtgatcgtctttttcttgattggatttatgattggctacttgggctattgtaaaggggtagaaccaaaaactgagtgtgagagactggcaggaaccgagtctccagtgagggaggagccaggagaggacttccctgcagcacgtcgcttatattgggatgacctgaagagaaagttgtcggagaaactggacagcacagacttcaccagcaccatcaagctgctgaatgaaaattcatatgtccctcgtgaggctggatctcaaaaagatgaaaatcttgcgttgtatgttgaaaatcaatttcgtgaatttaaactcagcaaagtctggcgtgatcaacattttgttaagattcaggtcaaagacagcgctcaaaactcggtgatcatagttgataagaacggtagacttgtttacctggtggagaatcctgggggttatgtggcgtatagtaaggctgcaacagttactggtaaactggtccatgctaattttggtactaaaaaagattttgaggatttatacactcctgtgaatggatctatagtgattgtcagagcagggaaaatcacctttgcagaaaaggttgcaaatgctgaaagcttaaatgcaattggtgtgttgatatacatggaccagactaaatttcccattgttaacgcagaactttcattctttggacatgctcatctggggacaggtgacccttacacacctggattcccttccttcaatcacactcagtttccaccatctcggtcatcaggattgcctaatatacctgtccagacaatctccagagctgctgcagaaaagctgtttgggaatatggaaggagactgtccctctgactggaaaacagactctacatgtaggatggtaacctcagaaagcaagaatgtgaagctcactgtgagcaatgtgctgaaagagataaaaattcttaacatctttggagttattaaaggctttgtagaaccagatcactatgttgtagttggggcccagagagatgcatggggccctggagctgcaaaatccggtgtaggcacagctctcctattgaaacttgcccagatgttctcagatatggtcttaaaagatgggtttcagcccagcagaagcattatctttgccagttggagtgctggagactttggatcggttggtgccactgaatggctagagggatacctttcgtccctgcatttaaaggctttcacttatattaatctggataaagcggttcttggtaccagcaacttcaaggtttctgccagcccactgttgtatacgcttattgagaaaacaatgcaaaatgtgaagcatccggttactgggcaatttctatatcaggacagcaactgggccagcaaagttgagaaactcactttagacaatgctgctttccctttccttgcatattctggaatcccagcagtttctttctgtttttgcgaggacacagattatccttatttgggtaccaccatggacacctataaggaactgattgagaggattcctgagttgaacaaagtggcacgagcagctgcagaggtcgctggtcagttcgtgattaaactaacccatgatgttgaattgaacctggactatgagaggtacaacagccaactgctttcatttgtgagggatctgaaccaatacagagcagacataaaggaaatgggcctgagtttacagtggctgtattctgctcgtggagacttcttccgtgctacttccagactaacaacagatttcgggaatgctgagaaaacagacagatttgtcatgaagaaactcaatgatcgtgtcatgagagtggagtatcacttcctctctccctacgtatctccaaaagagtctcctttccgacatgtcttctggggctccggctctcacacgctgccagctttactggagaacttgaaactgcgtaaacaaaataacggtgcttttaatgaaacgctgttcagaaaccagttggctctagctacttggactattcagggagctgcaaatgccctctctggtgacgtttgggacattgacaatgagttttaaatgtgatacccatagcttccatgagaacagcagggtagtctggtttctagacttgtgctgatcgtgctaaattttcagtagggctacaaaacctgatgttaaaattccatcccatcatcttggtactactagatgtctttaggcagcagcttttaatacagggtagataacctgtacttcaagttaaagtgaataaccacttaaaaaatgtccatgatggaatattcccctatctctagaattttaagtgctttgtaatgggaactgcctctttcctgttgttgttaatgaaaatgtcagaaaccagttatgtgaatgatctctctgaatcctaagggctggtctctgctgaaggttgtaagtggttcgcttactttgagtgatcctccaacttcatttgatgctaaataggagataccaggttgaaagacctctccaaatgagatctaagcctttccataaggaatgtagcaggtttcctcattcctgaaagaaacagttaactttcagaagagatgggcttgttttcttgccaatgaggtctgaaatggaggtccttctgctggataaaatgaggttcaactgttgattgcaggaataaggccttaatatgttaacctcagtgtcatttatgaaaagaggggaccagaagccaaagacttagtatattttcttttcctctgtcccttcccccataagcctccatttagttctttgttatttttgtttcttccaaagcacattgaaagagaaccagtttcaggtgtttagttgcagactcagtttgtcagactttaaagaataatatgctgccaaattttggccaaagtgttaatcttaggggagagctttctgtccttttggcactgagatatttattgtttatttatcagtgacagagttcactataaatggtgtttttttaatagaatataattatcggaagcagtgccttccataattatgacagttatactgtcggttttttttaaataaaagcagcatctgctaataaaacccaacagatactggaagttttgcatttatggtcaacacttaagggttttagaaaacagccgtcagccaaatgtaattgaataaagttgaagctaagatttagagatgaattaaatttaattaggggttgctaagaagcgagcactgaccagataagaatgctggttttcctaaatgcagtgaattgtgaccaagttataaatcaatgtcacttaaaggctgtggtagtactcctgcaaaattttatagctcagtttatccaaggtgtaactctaattcccatttgcaaaatttccagtacctttgtcacaatcctaacacattatcgggagcagtgtcttccataatgtataaagaacaaggtagtttttacctaccacagtgtctgtatcggagacagtgatctccatatgttacactaagggtgtaagtaattatcgggaacagtgtttcccataattttcttcatgcaatgacatcttcaaagcttgaagatcgttagtatctaacatgtatcccaactcctataattccctatcttttagttttagttgcagaaacattttgtggtcattaagcattgggtgggtaaattcaaccactgtaaaatgaaattactacaaaatttgaaatttagcttgggtttttgttacctttatggtttctccaggtcctctacttaatgagatagcagcatacatttataatgtttgctattgacaagtcattttaatttatcacattatttgcatgttacctcctataaacttagtgcggacaagttttaatccagaattgaccttttgacttaaagcagagggactttgtatagaaggtttgggggctgtggggaaggagagtcccctgaaggtctgacacgtctgcctacccattcgtggtgatcaattaaatgtaggtatgaataagttcgaagctccgtgagtgaaccatcatataaacgtgtagtacagctgtttgtcatagggcagttggaaacggcctcctagggaaaagttcatagggtctcttcaggttcttagtgtcacttacctagatttacagcctcacttgaatgtgtcactactcacagtctctttaatcttcagttttatctttaatctcctcttttatcttggactgacatttagcgtagctaagtgaaaaggtcatagctgagattcctggttcgggtgttacgcacacgtacttaaatgaaagcatgtggcatgttcatcgtataacacaatatgaatacagggcatgcattttgcagcagtgagtctcttcagaaaacccttttctacagttagggttgagttacttcctatcaagccagtacgtgctaacaggctcaatattcctgaatgaaatatcagactagtgacaagctcctggtcttgagatgtcttctcgttaaggagtagggccttttggaggtaaaggtata

SEQ ID NO: 112 - DNA, 2574 bp, Homo sapiens
cctgtttagacacatggacaacaatcccagcgctacaaggcacacagtccgcttcttcgtcctcagggttgccagcgcttcctggaagtcctgaagctctcgcagtgcagtgagttcatgcaccttcttgccaagcctcagtctttgggatctggggaggccgcctggttttcctccctccttctgcacgtctgctggggtctcttcctctccaggccttgccgtccccctggcctctcttcccagctcacacatgaagatgcacttgcaaagggctctggtggtcctggccctgctgaactttgccacggtcagcctctctctgtccacttgcaccaccttggacttcggccacatcaagaagaagagggtggaagccattaggggacagatcttgagcaagctcaggctcaccagcccccctgagccaacggtgatgacccacgtcccctatcaggtcctggccctttacaacagcacccgggagctgctggaggagatgcatggggagagggaggaaggctgcacccaggaaaacaccgagtcggaatactatgccaaagaaatccataaattcgacatgatccaggggctggcggagcacaacgaactggctgtctgccctaaaggaattacctccaaggttttccgcttcaatgtgtcctcagtggagaaaaatagaaccaacctattccgagcagaattccgggtcttgcgggtgcccaaccccagctctaagcggaatgagcagaggatcgagctcttccagatccttcggccagatgagcacattgccaaacagcgctatatcggtggcaagaatctgcccacacggggcactgccgagtggctgtcctttgatgtcactgacactgtgcgtgagtggctgttgagaagagagtccaacttaggtctagaaatcagcattcactgtccatgtcacacctttcagcccaatggagatatcctggaaaacattcacgaggtgatggaaatcaaattcaaaggcgtggacaatgaggatgaccatggccgtggagatctggggcgcctcaagaagcagaaggatcaccacaaccctcatctaatcctcatgatgattcccccacaccggctcgacaacccgggccaggggggtcagaggaagaagcgggctttggacaccaattactgcttccgcaacttggaggagaactgctgtgtgcgccccctctacattgacttccgacaggatctgggctggaagtgggtccatgaacctaagggctactatgccaacttctgctcaggcccttgcccatacctccgcagtgcagacacaacccacagcacggtgctgggactgtacaacactctgaaccctgaagcatctgcctcgccttgctgcgtgccccaggacctggagcccctgaccatcctgtactatgttgggaggacccccaaagtggagcagctctccaacatggtggtgaagtcttgtaaatgtagctgagaccccacgtgcgacagagagaggggagagagaaccaccactgcctgactgcccgctcctcgggaaacacacaagcaacaaacctcactgagaggcctggagcccacaaccttcggctccgggcaaatggctgagatggaggtttccttttggaacatttctttcttgctggctctgagaatcacggtggtaaagaaagtgtgggtttggttagaggaaggctgaactcttcagaacacacagactttctgtgacgcagacagaggggatggggatagaggaaagggatggtaagttgagatgttgtgtggcaatgggatttgggctaccctaaagggagaaggaagggcagagaatggctgggtcagggccagactggaagacacttcagatctgaggttggatttgctcattgctgtaccacatctgctctagggaatctggattatgttatacaaggcaagcatttttttttttaaagacaggttacgaagacaaagtcccagaattgtatctcatactgtctgggattaagggcaaatctattacttttgcaaactgtcctctacatcaattaacatcgtgggtcactacagggagaaaatccaggtcatgcagttcctggcccatcaactgtattgggccttttggatatgctgaacgcagaagaaagggtggaaatcaaccctctcctgtctgccctctgggtccctcctctcacctctccctcgatcatatttccccttggacacttggttagacgccttccaggtcaggatgcacatttctggattgtggttccatgcagccttggggcattatgggtcttcccccacttcccctccaagaccctgtgttcatttggtgttcctggaagcaggtgctacaacatgtgaggcattcggggaagctgcacatgtgccacacagtgacttggccccagacgcatagactgaggtataaagacaagtatgaatattactctcaaaatctttgtataaataaatatttttggggcatcctggatgatttcatcttctggaatattgtttctagaacagtaaaagccttattctaaggtg

SEQ ID NO: 113 - DNA, 1421 bp, Homo sapiens
acttactgcgggacggccttggagagtactcgggttcgtgaacttcccggaggcgcaatgagctgcattaacctgcccactgtgctgcccggctcccccagcaagacccgggggcagatccaggtgattctcgggccgatgttctcaggaaaaagcacagagttgatgagacgcgtccgtcgcttccagattgctcagtacaagtgcctggtgatcaagtatgccaaagacactcgctacagcagcagcttctgcacacatgaccggaacaccatggaggcgctgcccgcctgcctgctccgagacgtggcccaggaggccctgggcgtggctgtcataggcatcgacgaggggcagtttttccctgacatcatggagttctgcgaggccatggccaacgccgggaagaccgtaattgtggctgcactggatgggaccttccagaggaagccatttggggccatcctgaacctggtgccgctggccgagagcgtggtgaagctgacggcggtgtgcatggagtgcttccgggaagccgcctataccaagaggctcggcacagagaaggaggtcgaggtgattgggggagcagacaagtaccactccgtgtgtcggctctgctacttcaagaaggcctcaggccagcctgccgggccggacaacaaagagaactgcccagtgccaggaaagccaggggaagccgtggctgccaggaagctctttgccccacagcagattctgcaatgcagccctgccaactgagggacctgcaagggccgcccgctcccttcctgccactgccgcctactggacgctgccctgcatgctgcccagccactccaggaggaagtcgggaggcgtggagggtgaccacaccttggccttctgggaactctcctttgtgtggctgccccacctgccgcatgctccctcctctcctacccactggtctgcttaaagcttccctctcagctgctgggacgatcgcccaggctggagctggccccgcttggtggcctgggatctggcacactccctctccttggggtgagggacagagccccacgctgttgacatcagcctgcttcttcccctctgcggctttcactgctgagtttctgttctccctgggaagcctgtgccagcacctttgagccttggcccacactgaggcttaggcctctctgcctgggatgggctcccaccctcccctgaggatggcctggattcacgccctcttgtttccttttgggctcaaagcccttcctacctctggtgatggtttccacaggaacaacagcatctttcaccaagatgggtggcaccaaccttgctgggacttggatcccaggggcttatctcttcaagtgtggagagggcagggtccacgcctctgctgtagcttatgaaattaactaatt

SEQ ID NO: 114 - DNA, 649 bp, Homo sapiens
tcgggcctccgaaaccatgaactttctgctgtcttgggtgcattggagccttgccttgctgctctacctccaccatgccaagtggtcccaggctgcacccatggcagaaggaggagggcagaatcatcacgaagtggtgaagttcatggatgtctatcagcgcagctactgccatccaatcgagaccctggtggacatcttccaggagtaccctgatgagatcgagtacatcttcaagccatcctgtgtgcccctgatgcgatgcgggggctgctgcaatgacgagggcctggagtgtgtgcccactgaggagtccaacatcaccatgcagattatgcggatcaaacctcaccaaggccagcacataggagagatgagcttcctacagcacaacaaatgtgaatgcagaccaaagaaagatagagcaagacaagaaaatccctgtgggccttgctcagagcggagaaagcatttgtttgtacaagatccgcagacgtgtaaatgttcctgcaaaaacacagactcgcgttgcaaggcgaggcagcttgagttaaacgaacgtacttgcagatgtgacaagccgaggcggtgagccgggcaggaggaaggagcctccctcagcgtttcgggaaccagatctctcaccagg

SEQ ID NO: 115 - DNA, 2253 bp, Homo sapiens
ggaagacttgggtccttgggtcgcaggtgggagccgacgggtgggtagaccgtgggggatatctcagtggcggacgaggacggcggggacaaggggcggctggtcggagtggcggagcgtcaagtcccctgtcggttcctccgtccctgagtgtccttggcgctgccttgtgcccgcccagcgcctttgcatccgctcctgggcaccgaggcgccctgtaggatactgcttgttacttattacagctagaggcatcatggaccgatctaaagaaaactgcatttcaggacctgttaaggctacagctccagttggaggtccaaaacgtgttctcgtgactcagcaaattccttgtcagaatccattacctgtaaatagtggccaggctcagcgggtcttgtgtccttcaaattcttcccagcgcgttcctttgcaagcacaaaagcttgtctccagtcacaagccggttcagaatcagaagcagaagcaattgcaggcaaccagtgtacctcatcctgtctccaggccactgaataacacccaaaagagcaagcagcccctgccatcggcacctgaaaataatcctgaggaggaactggcatcaaaacagaaaaatgaagaatcaaaaaagaggcagtgggctttggaagactttgaaattggtcgccctctgggtaaaggaaagtttggtaatgtttatttggcaagagaaaagcaaagcaagtttattctggctcttaaagtgttatttaaagctcagctggagaaagccggagtggagcatcagctcagaagagaagtagaaatacagtcccaccttcggcatcctaatattcttagactgtatggttatttccatgatgctaccagagtctacctaattctggaatatgcaccacttggaacagtttatagagaacttcagaaactttcaaagtttgatgagcagagaactgctacttatataacagaattggcaaatgccctgtcttactgtcattcgaagagagttattcatagagacattaagccagagaacttacttcttggatcagctggagagcttaaaattgcagattttgggtggtcagtacatgctccatcttccaggaggaccactctctgtggcaccctggactacctgccccctgaaatgattgaaggtcggatgcatgatgagaaggtggatctctggagccttggagttctttgctatgaatttttagttgggaagcctccttttgaggcaaacacataccaagagacctacaaaagaatatcacgggttgaattcacattccctgactttgtaacagagggagccagggacctcatttcaagactgttgaagcataatcccagccagaggccaatgctcagagaagtacttgaacacccctggatcacagcaaattcatcaaaaccatcaaattgccaaaacaaagaatcagctagcaaacagtcttaggaatcgtgcagggggagaaatccttgagccagggctgccatataacctgacaggaacatgctactgaagtttattttaccattgactgctgccctcaatctagaacgctacacaagaaatatttgttttactcagcaggtgtgccttaacctccctattcagaaagctccacatcaataaacatgacactctgaagtgaaagtagccacgagaattgtgctacttatactggttcataatctggaggcaaggttcgactgcagccgccccgtcagcctgtgctaggcatggtgtcttcacaggaggcaaatccagagcctggctgtggggaaagtgaccactctgccctgaccccgatcagttaaggagctgtgcaataaccttcctagtacctgagtgagtgtgtaacttattgggttggcgaagcctggtaaagctgttggaatgagtatgtgattctttttaagtatgaaaataaagatatatgtacagacttgtattttttctctggtggcattcctttaggaatgctgtgtgtctgtccggcaccccggtaggcctgattgggtttctagtcctccttaaccacttatctcccatatgagagtgtgaaaaataggaacacgtgctctacctccatttagggatttgcttgggatacagaagaggccatgtgtctcagagctgttaagggcttatttttttaaaacattggagtcatagcatgtgtgtaaactttaaatatgcaaataaataagtatctatgtctaaaaaaaaaaaaaaaa

SEQ ID NO: 116 - DNA, 2785 bp, Homo sapiens
tccgcaagcctccgcctctgtgcgcgggactggaggagcctcgctgagcccagggcgcgacggcgagaggagagggaaggcgggggagggctggaagggagaggaagggagtggttgggagccgggctgccgcagcctctagtctcctcagccgcggaagcacccctcctcctgcgccgcggccgcctccctcctcgctgtggaaagatgcccttagcccaggggtgtgaagaagggggagaagtagctgccagagccgcccgcgccgccgccgcagctgctgctcgttgtgtcctttgaattcagagaagcacccccccgcctggggcgtcgggagcctccgggcggcggccgcggtgcggtgtcggggagaccgggctctctgcccgcgcggcgcggcgcggctcggcccacgagcgaccaccgacatggagtgggctcgggcggccaagtagccgcttctccggagccggtgccagtgccgcccgcagcccgccttccacccccggccgcgccgccggtcaggccctagggtgaagccgggaggaaaatgaagagttttcacccggaatccgttgaaaataggactgactgcaaagccttaaagaaagaaggacctcgggaggagaaacgaaaagccgcctccgggcaagacttggcgtgctccgagccgaggggctgcttcagggacctcgccccctccctttcccgctggagaaattgccgctgatgcattatccaagtggtggttgggaggatttgcagcaacatttttggttttccctcccccttctatgcattctgtttttttcctcccttttctgtttttcttcttcccgggaagtgaattgctgatgcaaatcggactttattcattaatgatgcaaccggattcgtttcaggattacgttgcacgagttgaattttgaatgaaggagaagagtttttttttttttttaaagaagtgttgactctctagttcgttgtacttttaattattattttatttaaatatacgacttaattgtattcttttaaaaatgcattaagtatatattttatggtaatttaccctcaaaatatatgtatatgggtgaaattgaagacgccttcagttaagtgaggttactggtgtgttggatgtttaattcagcaccagcattgcatgacagttgtttgaataacaagtggtttatttttaaaaccataccttttaaaatttaggttcagataatagtaaaagtcatcataataatttaaaggaaaaccagcagaaatcgaagcaaacatgtctggagaagtgcgtttgaggcagttggagcagtttattttggacgggcccgctcagaccaatgggcagtacttcagtgtggagacattactggatatactcatctgcctttatgatgaatgcaataattctccattgagaagagagaagaacattctcgaatacctagaatgggctaaaccatttacttctaaagtgaaacaaatgcgattacatagagaagactttgaaatattaaaggtgattggtcgaggagcttttggggaggttgctgtagtaaaactaaaaaatgcagataaagtgtttgccatgaaaatattgaataaatgggaaatgctgaaaagagctgagacagcatgttttcgtgaagaaagggatgtattagtgaatggagacaataaatggattacaaccttgcactatgctttccaggatgacaataacttatacctggttatggattattatgttggtggggatttgcttactctactcagcaaatttgaagatagattgcctgaagatatggctagattttacttggctgagatggtgatagcaattgactcagttcatcagctacattatgtacacagagacattaaacctgacaatatactgatggatatgaatggacatattcggttagcagattttggttcttgtctgaagctgatggaagatggaacggttcagtcctcagtggctgtaggaactccagattatatctctcctgaaatccttcaagccatggaagatggaaaagggagatatggacctgaatgtgactggtggtctttgggggtctgtatgtatgaaatgctttacggagaaacaccattttatgcagaatcgctggtggagacatacggaaaaatcatgaaccacaaagagaggtttcagtttccagcccaagtgactgatgtgtctgaaaatgctaaggatcttattcgaaggctcatttgtagcagagaacatcgacttggtcaaaatggaatagaagactttaagaaacacccatttttcagtggaattgattgggataatattcggaactgtgaagcaccttatattccagaagttagtagcccaacagatacatcgaattttgatgtagatgatgattgtttaaaaaattctgaaacgatgcccccaccaacacatactgcattttctggccaccatctgccatttgttggttttacatatactagtagctgtgtactttctgatcggagctgtttaagagttacggctggtcccacctcactggatcttgatgttaatgttcagaggactctagacaacaacttagcaactgaagcttatgaaagaagaattaagcgccttgagcaagaaaaacttgaactcagtagaaaacttcaagagtcaacacagactgtccaagctctgcagtattcaactgttgatggtccactaacagcaagcaaagatttagaaataaaaaacttaaaagaagaaatttgaaaaaaa

SEQ ID NO: 117 - DNA, 1318 bp, Homo sapiens
ctcctctaggccgccggccgcgaagcgctgagtcacggtgaggcgactggacccacactctcttaacctgccctccctgcactcgctcccggcggctcttcgcgtcacccccgccgctaaggctccaggtgccgctaccgcagcgtgagtacctggggctcctgcaggggtccactagccctccatcctctacagctcagcatcagaacactctctttttagactccgatatggggtcctccaagaaagttactctctcagtgctcagccgggagcagtcggaaggggttggagcgagggtccggagaagcattggcagacccgagttaaaaaatctggatccgtttttactgtttgatgaatttaaaggaggtagaccaggaggatttcctgatcatccacatcgaggttttgaaacagtatcctacctcctggaagggggcagcatggcccatgaagacttctgtggacacactggtaaaatgaacccaggagatttgcagtggatgactgcgggccggggcattctgcacgctgagatgccttgctcagaggagccagcccatggcctacaactgtgggttaatttgaggagctcagagaagatggtggagcctcagtaccaggaactgaaaagtgaagaaatccctaaacccagtaaggatggtgtgacagttgctgtcatttctggagaagccctgggaataaagtccaaggtttacactcgcacaccaaccttatatttggacttcaaattggacccaggagccaaacattcccaacctatccctaaagggtggacaagcttcatttacacgatatctggagatgtgtatattgggcccgatgatgcacaacaaaaaatagaacctcatcacacagcagtgcttggagaaggtgacagtgtccaggtggagaacaaggatcccaagagaagccactttgtcttaattgctggggagccattaagagaaccagttatccaacatggtccatttgtgatgaacaccaatgaagagatttctcaagctattcttgatttcagaaacgcaaaaaatgggtttgaaagggccaaaacctggaaatcaaagattgggaactagtggaaagcggaagagcaggtcttgatgtgtcctagaattttgccatttctgagattgagccattgaaggcattccatttctaaagcttatttagccggtgcttctaaagaattccacactaacgtgataacatggtttttgtaacaataaatgtaggatatttcctggcacatgcaaataaacctaatcattgtttctttaaaaaaaaaaaaaaa

SEQ ID NO: 118 - DNA, 1375 bp, Homo sapiens
  misc_feature (1246)..(1246): n is a, c, g, or t
  misc_feature (1256)..(1256): n is a, c, g, or t
gccgccgccacctctgagcagccggctgggagcgagagccgacagctagtctgcaagccaccgctgtcgccatggggagccgcgtctcgcgggaagacttcgagtgggtctacaccgaccagccgcacgccgaccggcgccgggagatcctggcaaagtatccagagataaagtccttgatgaaacctgatcccaatttgatatggattataattatgatggttctcacccagttgggtgcattttacatagtaaaagacttggactggaaatgggtcatatttggggcctatgcgtttggcagttgcattaaccactcaatgactctggctattcatgagattgcccacaatgctgcctttggcaactgcaaagcaatgtggaatcgctggtttggaatgtttgctaatcttcctattgggattccatattcaatttcctttaagaggtatcacatggatcatcatcggtaccttggagctgatggcgtcgatgtagatattcctaccgattttgagggctggttcttctgtaccgctttcagaaagtttatatgggttattcttcagcctctcttttatgcctttcgacctctgttcatcaaccccaaaccaattacgtatctggaagttatcaataccgtggcacaggtcacttttgacattttaatttattactttttgggaattaaatccttagtctacatgttggcagcatctttacttggcctgggtttgcacccaatttctggacattttatagctgagcattacatgttcttaaagggtcatgaaacttactcatattatgggcctctgaatttacttaccttcaatgtgggttatcataatgaacatcatgatttccccaacattcctggaaaaagtcttccactggtgaggaaaatagcagctgaatactatgacaacctccctcactacaattcctggataaaagtactgtatgattttgtgatggatgatacaataagtccctactcaagaatgaagaggcaccaaaaaggagagatggtgctggagtaaatatcattagtgccaaagggattcttctccaaaactttagatgataaaattagccgggcgtggcggcacatgcctgtaatcccagctacatgggaggctgaggtgggagaattgcttgaacccaggaggcggaggcagaggctgcagtgacccaagattgtgccactgcactccaccctgggcaacagagcaagaccccatcntcgagagatnagatgagatatatataaaaaataaaaagctatttctagtttatttcactataaagttttgctttattaaaaagctaataaacagctattaatcacaaaaaaaaaaaaaaaaaaaaaaaa

SEQ ID NO: 119 - DNA, 3134 bp, Homo sapiens
tccagcgaacagccccgcttctaacccgagatgctgctgccggcgcccgcgctccgccgcgccctgctgtcccgcccctggaccggggccggcctgcggtggaagcacacctcctccctgaaggtggccaacgagcccgtcttagccttcacgcagggcagccctgagcgagatgccctgcaaaaggccttgaaggacctgaagggccggatggaagccatcccatgcgtgatgggggatgaggaggtgtggacgtcggacgtgcagtaccaagtgtcgccttttaaccatggacataaggtggccaagttctgttatgcagacaagagcctgctcaacaaagccattgaggctgccctggctgcccggaaagagtgggacctgaagcctattgcagaccgggcccagatcttcctgaaggcggcagacatgctgagtgggccgcgcagggctgagatcctcgccaagaccatggtgggacagggtaagaccgtgatccaagcggagattgacgctgcagcggaactcatcgacttcttccggttcaatgccaagtatgcggtggagctggaggggcagcagcccatcagcgtgcccccgagcaccaacagcacggtgtaccggggtctggagggcttcgtggcggccatctcgccctttaacttcactgcaatcggcggcaacctggcgggggcaccggccctgatgggcaacgtggtcctatggaagcccagtgacactgccatgctggccagctatgctgtctaccgcatccttcgggaggctggcctgccccccaacatcatccagtttgtgccagctgatgggcccctatttggggacactgtcaccagctcagagcacctctgtggcatcaacttcacaggcagtgtgcccaccttcaaacacctgtggaagcaggtggcccagaacctggaccggttccacaccttcccacgcctggctggagagtgcggcggaaagaacttccacttcgtgcaccgctcggccgacgtggagagcgtggtgagcgggaccctccgctcagccttcgagtacggtggccagaagtgttccgcctgctcgcgtctctacgtgccgcactcgctgtggccgcagatcaaagggcggctgctggaggagcacagtcggatcaaagtgggcgaccctgcagaggattttgggaccttcttctctgcagtgattgatgccaagtcctttgcccgtatcaagaagtggctggagcacgcgcgctcctcgcccagcctcaccatcctggctgggggcaagtgtgatgactccgtgggctactttgtggagccctgcatcgtggagagcaaggaccctcaggagcccatcatgaaggaggagatcttcgggcctgtactgtctgtgtacgtctacccggacgacaagtacaaggagacgctgcagctggttgacagcaccaccagctatggcctcacgggggcagtgttctcccaggataaggacgtcgtgcaggaggccacaaaggtgctgaggaatgctgccggcaacttctacatcaacgacaagtccactggctcgatagtgggccagcagccctttgggggggcccgagcctctggaaccaatgacaagccagggggcccacactacatcctgcgctggacgtcgccgcaggtcatcaaggagacacataagcccctgggggactggagctacgcgtacatgcagtgagcccctctcgggctccaccgtccagctgtctgtccgtccaggtggccgacctcactgcacagaccccactccagcccctccaccccttcttcatgcacagctgcctttctataatccgggcttgactcccttcttaccactgtattctggcctctcccatgcctcaggctctggtttgagatcgtgctggggaggaacatggccactaccccttatcccatcggccatgtgggaggtatgaccctggtgcctggcaggttctccctctgccctccactgggcccagtggctcagggacctggggaaaggagatggagcagctcttgggatcctttggggaaaaggaggccattctgggccccttggcaaacctcaccactcacagaggctcctggccttgatccctgcccctccaggtgtccagggtaaagtgtaactcagactgacctgtggggcacagggggcaccagctggccttgccctctctggtctgggctgtctaccttcctcactgtatctttgcccagacccacctgggccagtaggcctgtccccagccacacaccttagatgctggcatgccttactccaggtgcctgtgtttggccgaggcctgtgtgattcccggtctgcaccacatggcggggttggggggccgctggaggccacctgccaaggcgtgggatgggatggtcctgccggtttaggccgtgattctggaaaaccttggatgggccttcgtcctatgtcagccttccctttgatcctcaggccctacctgtagagacctccactcctagagccagtctcagggtctgggatttccctgcaggagctcagccaccactgtgccatggtgacacaggccaaggcagacattggccctcccttctcccagcccccagaggcctggccttgggttcgtcagcatgggccgaggacgttgcctgtagaatcctcctctgcctgggagtggctctgtgtggaccagtccctcactggcccattctttttttgacgcagccaatctgtgaccacgattcctcccacagatgcctcctgcttggattctgagtggtcagagatctgtaaagcatgactttcaaggatggttcttaggggactgtgtaaagtgttgggtcttcctccaggatgcctgcatgggaccccacccggagctggtgtggccattccccgaagtgccactggcccatggatgggggtgggtgctggtgcacctgggctgggtgtgggttctgtgtccttccaggatctgtgtcatttcccatgaggggccggggcaggtggctgggtgggggcacaggctggagtattcttagttctactggttctacactgtgaggtggcaatgggatttgctcagatgccacccaataaaatgcctgttactt

SEQ ID NO: 120 - DNA, 1546 bp, Homo sapiens
cacggccggagagacgcggaggaggagacatgagccggcgggcgcccagacggagcggccgtgacgctttcgcgctgcagccgcgcgccccgaccccggagcgctgacccctggccccacgcagctccgcgcccgggccggagagcgcaactcggcttccagacccgccgcgcatgctgtccccggactgagccgggcagccagcctcccacggacgcccggacggccggccggccagcagtgagcgagcttccccgcaccggccaggcgcctcctgcacagcggctgccgccccgcagcccctgcgccagcccggagggcgcagcgctcgggaggagccgcgcggggcgctgatgccgcagggcgcgccgcggagcgccccggagcagcagagtctgcagcagcagcagccggcgaggagggagcagcagcagcggcggcggcggcggcggcggcggcggaggcgcccggtcccggccgcgcggagcggacatgtgcaggctgggctaggagccgccgcctccctcccgcccagcgatgtattcagcgccctccgcctgcacttgcctgtgtttacacttcctgctgctgtgcttccaggtacaggtgctggttgccgaggagaacgtggacttccgcatccacgtggagaaccagacgcgggctcgggacgatgtgagccgtaagcagctgcggctgtaccagctctacagccggaccagtgggaaacacatccaggtcctgggccgcaggatcagtgcccgcggcgaggatggggacaagtatgcccagctcctagtggagacagacaccttcggtagtcaagtccggatcaagggcaaggagacggaattctacctgtgcatgaaccgcaaaggcaagctcgtggggaagcccgatggcaccagcaaggagtgtgtgttcatcgagaaggttctggagaacaactacacggccctgatgtcggctaagtactccggctggtacgtgggcttcaccaagaaggggcggccgcggaagggccccaagacccgggagaaccagcaggacgtgcatttcatgaagcgctaccccaaggggcagccggagcttcagaagcccttcaagtacacgacggtgaccaagaggtcccgtcggatccggcccacacaccctgcctaggccaccccgccgcggcccctcaggtcgccctggccacactcacactcccagaaaactgcatcagaggaatatttttacatgaaaaataaggaagaagctctatttttgtacattgtgtttaaaagaagacaaaaactgaaccaaaactcttggggggaggggtgataaggattttattgttgacttgaaacccccgatgacaaaagactcacgcaaagggactgtagtcaacccacaggtgcttgtctctctctaggaacagacaactctaaactcgtccccagaggaggacttgaatgaggaaaccaacactttgagaaaccaaagtcctttttcccaaaggttctgaaaggaaaaaaaaaaaaaaacaaaaaaaaaaaaaaaa

SEQ ID NO: 121 - DNA, 2212 bp, Homo sapiens
tgccggctgctcctcgaccaggcctccttctcaacctcagcccgcggcgccgacccttccggcaccctcccgccccgtctcgtactgtcgccgtcaccgccgcggctccggccctggccccgatggctctgtgcaacggagactccaagctggagaatgctggaggagaccttaaggatggccaccaccactatgaaggagctgttgtcattctggatgctggtgctcagtacgggaaagtcatagaccgaagagtgagggaactgttcgtgcagtctgaaattttccccttggaaacaccagcatttgctataaaggaacaaggattccgtgctattatcatctctggaggacctaattctgtgtatgctgaagatgctccctggtttgatccagcaatattcactattggcaagcctgttcttggaatttgctatggtatgcagatgatgaataaggtatttggaggtactgtgcacaaaaaaagtgtcagagaagatggagttttcaacattagtgtggataatacatgttcattattcaggggccttcagaaggaagaagttgttttgcttacacatggagatagtgtagacaaagtagctgatggattcaaggttgtggcacgttctggaaacatagtagcaggcatagcaaatgaatctaaaaagttatatggagcacagttccaccctgaagttggccttacagaaaatggaaaagtaatactgaagaatttcctttatgatatagctggatgcagtggaaccttcaccgtgcagaacagagaacttgagtgtattcgagagatcaaagagagagtaggcacgtcaaaagttttggttttactcagtggtggagtagactcaacagtttgtacagctttgctaaatcgtgctttgaaccaagaacaagtcattgctgtgcacattgataatggctttatgagaaaacgagaaagccagtctgttgaagaggccctcaaaaagcttggaattcaggtcaaagtgataaatgctgctcattctttctacaatggaacaacaaccctaccaatatcagatgaagatagaaccccacggaaaagaattagcaaaacgttaaatatgaccacaagtcctgaagagaaaagaaaaatcattggggatacttttgttaagattgccaatgaagtaattggagaaatgaacttgaaaccagaggaggttttccttgcccaaggtactttacggcctgatctaattgaaagtgcatcccttgttgcaagtggcaaagctgaactcatcaaaacccatcacaatgacacagagctcatcagaaagttgagagaggagggaaaagtaatagaacctctgaaagattttcataaagatgaagtgagaattttgggcagagaacttggacttccagaagagttagtttccaggcatccatttccaggtcctggcctggcaatcagagtaatatgtgctgaagaaccttatatttgtaaggactttcctgaaaccaacaatattttgaaaatagtagctgatttttctgcaagtgttaaaaagccacataccctattacagagagtcaaagcctgcacaacagaagaggatcaggagaagctgatgcaaattaccagtctgcattcactgaatgccttcttgctgccaattaaaactgtaggtgtgcagggtgactgtcgttcctacagttacgtgtgtggaatctccagtaaagatgaacctgactgggaatcacttatttttctggctaggcttatacctcgcatgtgtcacaacgttaacagagttgtttatatatttggcccaccagttaaagaacctcctacagatgttactcccactttcttgacaacaggggtgctcagtactttacgccaagctgattttgaggcccataacattctcagggagtctgggtatgctgggaaaatcagccagatgccggtgattttgacaccattacattttgatcgggacccacttcaaaagcagccttcatgccagagatctgtggttattcgaacctttattactagtgacttcatgactggtatacctgcaacacctggcaatgagatccctgtagaggtggtattaaagatggtcactgagattaagaagattcctggtatttctcgaattatgtatgacttaacatcaaagcccccaggaactactgagtgggagtaataaacttc

SEQ ID NO: 122 - DNA, 1280 bp, Homo sapiens
tgccgcagcccccgcccgcccgcagagcttttgaaaggcggcgggaggcggcgagcgccatggccagtccgggctgcctgctgtgcgtgctgggcctgctactctgcggggcggcgagcctcgagctgtctagaccccacggcgacaccgccaagaagcccatcatcggaatattaatgcaaaaatgccgtaataaagtcatgaaaaactatggaagatactatattgctgcgtcctatgtaaagtacttggagtctgcaggtgcgagagttgtaccagtaaggctggatcttacagagaaagactatgaaatacttttcaaatctattaatggaatccttttccctggaggaagtgttgacctcagacgctcagattatgctaaagtggccaaaatattttataacttgtccatacagagttttgatgatggagactattttcctgtgtggggcacatgccttggatttgaagagctttcactgctgattagtggagagtgcttattaactgccacagatactgttgacgtggcaatgccgctgaacttcactggaggtcaattgcacagcagaatgttccagaattttcctactgagttgttgctgtcattagcagtagaacctctgactgccaatttccataagtggagcctctccgtgaagaattttacaatgaatgaaaagttaaagaagtttttcaatgtcttaactacaaatacagatggcaagattgagtttatttcaacaatggaaggatataagtatccagtatatggtgtccagtggcatccagagaaagcaccttatgagtggaagaatttggatggcatttcccatgcacctaatgctgtgaaaaccgcattttatttagcagagttttttgttaatgaagctcggaaaaacaaccatcattttaaatctgaatctgaagaggagaaagcattgatttatcagttcagtccaatttatactggaaatatttcttcatttcagcaatgttacatatttgattgaaagtcttcaatttgttaacagagcaaatttgaataattccatgattaaactgttagaataacttgctactcatggcaagattaggaagtcacagattcttttctataatgtgcctggctctgattcttcattatgtatgtgactatttatataacattagataattaaatagtgagacataaatagagtgctttttcatggaaaagccttcttatatctgaagattgaaaaataaatttactgaaatacaaaaaaaaaaaaaaa

SEQ ID NO: 123 - DNA, 2830 bp, Homo sapiens
cccacgcgtccgctgggcccagctcccccgagaggtggtcggatcctctgggctgctcggtcgatgcctgtgccactgacgtccaggcatgaggtggttcctgccctggacgctggcagcagtgacagcagcagccgccagcaccgtcctggccacggccctctctccagcccctacgaccatggactttactccagctccactggaggacacctcctcacgcccccaattctgcaagtggccatgtgagtgcccgccatccccaccccgctgcccgctgggggtcagcctcatcacagatggctgtgagtgctgtaagatgtgcgctcagcagcttggggacaactgcacggaggctgccatctgtgacccccaccggggcctctactgtgactacagcggggaccgcccgaggtacgcaataggagtgtgtgcacaggtggtcggtgtgggctgcgtcctggatggggtgcgctacaacaacggccagtccttccagcctaactgcaagtacaactgcacgtgcatcgacggcgcggtgggctgcacaccactgtgcctccgagtgcgccccccgcgtctctggtgcccccacccgcggcgcgtgagcatacctggccactgctgtgagcagtgggtatgtgaggacgacgccaagaggccacgcaagaccgcaccccgtgacacaggagccttcgatgctgtgggtgaggtggaggcatggcacaggaactgcatagcctacacaagcccctggagcccttgctccaccagctgcggcctgggggtctccactcggatctccaatgttaacgcccagtgctggcctgagcaagagagccgcctctgcaacttgcggccatgcgatgtggacatccatacactcattaaggcagggaagaagtgtctggctgtgtaccagccagaggcatccatgaacttcacacttgcgggctgcatcagcacacgctcctatcaacccaagtactgtggagtttgcatggacaataggtgctgcatcccctacaagtctaagactatcgacgtgtccttccagtgtcctgatgggcttggcttctcccgccaggtcctatggattaatgcctgcttctgtaacctgagctgtaggaatcccaatgacatctttgctgacttggaatcctaccctgacttctcagaaattgccaactaggcaggcacaaatcttgggtcttggggactaacccaatgcctgtgaagcagtcagcccttatggccaataacttttcaccaatgagccttagttaccctgatctggacccttggcctccatttctgtctctaaccattcaaatgacgcctgatggtgctgctcaggcccatgctatgagttttctccttgatatcattcagcatctactctaaagaaaaatgcctgtctctagctgttctggactacacccaagcctgatccagcctttccaagtcactagaagtcctgctggatcttgcctaaatcccaagaaatggaatcaggtagacttttaatatcactaatttcttctttagatgccaaaccacaagactctttgggtccattcagatgaatagatggaatttggaacaatagaataatctattatttggagcctgccaagaggtactgtaatgggtaattctgacgtcagcgcaccaaaactatcctgattccaaatatgtatgcacctcaaggtcatcaaacatttgccaagtgagttgaatagttgcttaattttgatttttaatggaaagttgtatccattaacctgggcattgttgaggttaagtttctcttcacccctacactgtgaagggtacagattaggtttgtcccagtcagaaataaaatttgataaacattcctgttgatgggaaaagcccccagttaatactccagagacagggaaaggtcagcccatttcagaaggaccaattgactctcacactgaatcagctgctgactggcagggctttgggcagttggccaggctcttccttgaatcttctcccttgtcctgcttgggttcataggaattggtaaggcctctggactggcctgtctggcccctgagagtggtgccctggaacactcctctactcttacagagccttgagagacccagctgcagaccatgccagacccactgaaatgaccaagacaggttcaggtaggggtgtgggtcaaaccaagaagtgggtgcccttggtagcagcctggggtgacctctagagctggaggctgtgggactccaggggcccccgtgttcaggacacatctattgcagagactcatttcacagcctttcgttctgctgaccaaatggccagttttctggtaggaagatggaggtttaccagttgtttagaaacagaaatagacttaataaaggtttaaagctgaagaggttgaagctaaaaggaaaaggttgttgttaatgaatatcaggctattatttattgtattaggaaaatataatatttactgttagaattcttttatttagggccttttctgtgccagacattgctctcagtgctttgcatgtattagctcactgaatcttcacgacaatgttgagaagttcccattattatttctgttcttacaaatgtgaaacggaagctcatagaggtgagaaaactcaaccagagtcacccagttggtgactgggaaagttaggattcagatcgaaattggactgtctttataacccatattttccccctgtttttagagcttccaaatgtgtcagaataggaaaacattgcaataaatggcttgattttttaaaaaaaaaaaaaaaaaaaaaaa

SEQ ID NO: 124 - DNA, 3044 bp, Homo sapiens
gtttgcgggtggttgttgctctcggggccgtgtggagtaggtctggacctggactcacggctgcttggagcgtccgccatgaggagaagtgaggtgctggcggaggagtccatagtatgtctgcagaaagccctaaatcaccttcgggaaatatgggagctaattgggattccagaggaccagcggttacaaagaactgaggtggtaaagaagcatatcaaggaactcctggatatgatgattgctgaagaggaaagcctgaaggaaagactcatcaaaagcatatccgtctgtcagaaagagctgaacactctgtgcagcgagttacatgttgagccatttcaggaagaaggagagacgaccatcttgcaactagaaaaagatttgcgcacccaagtggaattgatgcgaaaacagaaaaaggagagaaaacaggaactgaagctacttcaagagcaagatcaagaactgtgcgaaattctttgtatgccccactatgatattgacagtgcctcagtgcccagcttagaagagctgaaccagttcaggcaacatgtgacaactttgagggaaacaaaggcttctaggcgtgaggagtttgtcagtataaagagacagatcatactgtgtatggaagaattagaccacaccccagacacaagctttgaaagagatgtggtgtgtgaagacgaagatgccttttgtttgtctttggagaatattgcaacactacaaaagttgctacggcagctggaaatgcagaaatcacaaaatgaagcagtgtgtgaggggctgcgtactcaaatccgagagctctgggacaggttgcaaatacctgaagaagaaagagaagctgtggccaccattatgtctgggtcaaaggccaaggtccggaaagcgctgcaattagaagtggatcggttggaagaactgaaaatgcaaaacatgaagaaagtgattgaggcaattcgagtggagctggttcagtactgggaccagtgcttttatagccaggagcagagacaagcttttgcccctttctgtgctgaggactacacagaaagtctgctccagctccacgatgctgagattgtgcggttaaaaaactactatgaagttcacaaggaactctttgaaggtgtccagaagtgggaagaaacctggaggcttttcttagagtttgagagaaaagcttcagatccaaatcgatttacaaaccgaggaggaaatcttctaaaagaagaaaaacaacgagccaagctccagaaaatgctgcccaagctggaagaagagttgaaggcacgaattgaattgtgggaacaggaacattcaaaggcatttatggtgaatgggcagaaattcatggagtatgtggcagaacaatgggagatgcatcgattggagaaagagagagccaagcaggaaagacaactgaagaacaaaaaacagacagagacagagatgctgtatggcagcgctcctcgaacacctagcaagcggcgaggactggctcccaatacaccgggcaaagcacgtaagctgaacactaccaccatgtccaatgctacggccaatagtagcattcggcctatctttggagggacagtctaccactcccccgtgtctcgacttcctccttctggcagcaagccagtcgctgcttccacctgttcagggaagaaaacaccccgtactggcaggcatggagccaacaaggagaacctggagctcaacggcagcatcctgagtggtgggtaccctggctcggcccccctccagcgcaacttcagcattaattctgttgccagcacctattctgagtttgcgaaggatccgtccctctctgacagttccactgttgggcttcagcgagaactttcaaaggcttccaaatctgatgctacttctggaatcctcaattcaaccaacatccagtcctgagaagccctgatcagtcaaccagctgtggcttcctgtgcctagactggacctaattatatgggggtgactttagtttttcttcagcttaggagtgcttgaaaccttggccaggttccatgaccatgggcctaacttaaagatgtgaatgagtgttacagttgaaagcccatcataggtttagtggtcctaggagacttggttttgacttatatacatgaaaagtttatggcaagaagtgcaaattttagcatatggggcctgacttctctaccacataattctacttgctgaagcatgatcaaagcttgttttatttcaccactgtaggaaaatgattgactatgcccatccctgggggtaattttggcatgtatacctgtaactagtaattaacatcttttttgtttaggcatgttcaattaatgctgtagctatcatagctttgctcttacctgaagccttgtccccaccacacaggacagccttcctcctgaagagaatgtctttgtgtgtccgaagttgagatggcctgccctactggcaaagaggtgacaggaaggctgggagcagctttgttaaattgtgttcagttctgttacacagtgcattgccctttgttgggggtatgcatgtatgaacacacatgcttgtcggaacgctttctcggcgtttgtcccttggctctcatctcccccattcctgtgcctactttgcctgagttcttctacccccgcagttgccagccagattgggagtctgtttgttccaatgggttgagctgtctttgtcgtggagatctggaactttgcacatgtcactactggggaggtgttcctgctctagcttccacgatgaggcgccctctttacctatcctctcaatcactactcttcttgaagcactattatttattcttccgctgtctgcctgcagcagtactactgtcaacatagtgtaaatggttctcaaaagcttaccagtgtggacttggtgttagccacgctgtttacctcatacagtacgtgtcctgtttttaaaatatacaattattcttaaaaataaattaaaatcgtatacttacatttcaaaaaaaaaaaaaaaaa

SEQ ID NO: 125 - DNA, 1535 bp, Homo sapiens
cctccgctcagtccgggagcgcacgtgggccgcggcgctccgacctccgctttcccaccgcccgcagctgaagcacatcccgcagcccggcgcggactccgatcgccgcagttgccctctggcgccatgtcgcagaacggagcgcccgggatgcaggaggagagcctgcagggctcctgggtagaactgcacttcagcaataatgggaacgggggcagcgttccagcctcggtttctatttataatggagacatggaaaaaatactgctggacgcacagcatgagtctggacggagtagctccaagagctctcactgtgacagcccacctcgctcgcagacaccacaagataccaacagggcttctgaaacagatacccatagcattggagagaaaaacagctcacagtctgaggaagatgatattgaaagaaggaaagaagttgaaagcatcttgaagaaaaactcagattggatatgggattggtcaagtcggccggaaaatattccccccaaggagttcctctttaaacacccgaagcgcacggccaccctcagcatgaggaacacgagcgtcatgaagaaagggggcatattctctgcagaatttctgaaagttttccttccatctctgctgctctctcatttgctggccatcggattggggatctatattggaaggcgtctgacaacctccaccagcaccttttgatgaagaactggagtctgacttggttcgttagtggattacttctgagcttgcaacatagctcactgaagagctgttagatcctggggtggccacgtcacttgtgtttatttgttctgtaaatgctgcgttcctaatttagtaaaataaaagaatagacactaaaatcatgttgatctataattacacctatgggatcaataagcatgtcagactgattaatgtctactgtgaaaatttggtagtaaattttcatttgatattagatataaatatctgaatataaataattttaatatactagtcatgatgtgtgttgtattttaaaaattatctgcaaccttaattcagctgaagtactttatatttcaaaagaatgaataacattgataataaaatcgctactttaaggggtttgtccaaaataaatattgtggccttatatatcacactattgtagaaagtattatttaatttaaatggatgcaggttgtctactaaagaaagattatatataactatgctaattgttcataatcaacagaaaccaagatagagctacaaactcagctgtacagttcgtacactaaactcttcttgcttttgcattataaggaattaagtctccgattattaggtgatcaccctggatgatcagttttctgctgaaggcacctactcagtatcttttcctctttatcactctgcattggtgaatttaatcctctcctttgtgttcaacttttgtgtgcttttaaaatcagctttattctaagcaaatctgtgtctactttaaaaaactggaaatggaaaaaaaaataaatctt

SEQ ID NO: 126 - DNA, 1042 bp, Homo sapiens
ggcttgggaaggggaaggaaacttctctgaaatctgaacacctgctctcccggcaaggaaacttcgaaggctgaccgaccaagaccatcactatgaccgatggagactatgattatctgatcaaactcctggccctcggggattcaggggtggggaagacaacatttctttatagatacacagataataaattcaatcccaaattcatcactacagtaggaatagactttcgggaaaaacgtgtggtttataatgcacaaggaccgaatggatcttcagggaaagcatttaaagtgcatcttcagctttgggacactgcgggacaagagcggttccggagtctcaccactgcatttttcagagacgccatgggcttcttattaatgtttgacctcaccagtcaacagagcttcttaaatgtcagaaactggatgagccaactgcaagcaaatgcttattgtgaaaatccagatatagtattaattggcaacaaggcagacctaccagatcagagggaagtcaatgaacggcaagctcgggaactggctgacaaatatggcataccatattttgaaacaagtgcagcaactggacagaatgtggagaaagctgtagaaacccttttggacttaatcatgaagcgaatggaacagtgtgtggagaagacacaaatccctgatactgtcaatggtggaaattctggaaacttggatggggaaaagccaccagagaagaaatgtatctgctagactctacatagaaactgaacatcaagaaccccaccaaaatattacttttaaaacaatgacaaaccacacaattgttgttgagtaaaccacgcacaatggcatgtctttctttttctgccagaaaatctattttaagaaaccagaatagtcaacagtgttcaaaagaattgactagttatccctgaggccctttcaaacatgatcaaagatttcccaatgtgatctcatcatcatggatactcaatttgttttttcttatagagaaaatgagtatatagacatatacagagaat

SEQ ID NO: 127 - DNA, 3446 bp, Homo sapiens
ttctagtttgcggttcaggtttgccgctgccggccagcgtcctctggccatggacaccccggaaaatgtccttcagatgcttgaagcccacatgcagagctacaagggcaatgaccctcttggtgaatgggaaagatacatacagtgggtagaagagaattttcctgagaataaagaatacttgataactttactagaacatttaatgaaggaatttttagataagaagaaataccacaatgacccaagattcatcagttattgtttaaaatttgctgagtacaacagtgacctccatcaattttttgagtttctgtacaaccatgggattggaaccctgtcatcccctctgtacattgcctgggcggggcatctggaagcccaaggagagctgcagcatgccagtgctgtccttcagagaggaattcaaaaccaggctgaacccagagagttcctgcaacaacaatacaggttatttcagacacgcctcactgaaacccatttgccagctcaagctagaacctcagaacctctgcataatgttcaggttttaaatcaaatgataacatcaaaatcaaatccaggaaataacatggcctgcatttctaagaatcagggttcagagctttctggagtgatatcttcagcttgtgataaagagtcaaatatggaacgaagagtgatcacgatttctaaatcagaatattctgtgcactcatctttggcatccaaagttgatgttgagcaggttgttatgtattgcaaggagaagcttattcgtggggaatcagaattttcctttgaagaattgagagcccagaaatacaatcaacggagaaagcatgagcaatgggtaaatgaagacagacattatatgaaaaggaaagaagcaaatgcttttgaagaacagctattaaaacagaaaatggatgaacttcataagaagttgcatcaggtggtggagacatcccatgaggatctgcccgcttcccaggaaaggtccgaggttaatccagcacgtatggggccaagtgtaggctcccagcaggaactgagagcgccatgtcttccagtaacctatcagcagacaccagtgaacatggaaaagaacccaagagaggcacctcctgttgttcctcctttggcaaatgctatttctgcagctttggtgtccccagccaccagccagagcattgctcctcctgttcctttgaaagcccagacagtaacagactccatgtttgcagtggccagcaaagatgctggatgtgtgaataagagtactcatgaattcaagccacagagtggagcagagatcaaagaagggtgtgaaacacataaggttgccaacacaagttcttttcacacaactccaaacacatcactgggaatggttcaggcaacgccatccaaagtgcagccatcacccaccgtgcacacaaaagaagcattaggtttcatcatgaatatgtttcaggctcctacacttcctgatatttctgatgacaaagatgaatggcaatctctagatcaaaatgaagatgcatttgaagcccagtttcaaaaaaatgtaaggtcatctggggcttggggagtcaataagatcatctcttctttgtcatctgcttttcatgtgtttgaagatggaaacaaagaaaattatggattaccacagcctaaaaataaacccacaggagccaggacctttggagaacgctctgtcagcagacttccttcaaaaccaaaggaggaagtgcctcatgctgaagagtttttggatgactcaactgtatggggtattcgctgcaacaaaaccctggcacccagtcctaagagcccaggagacttcacatctgctgcacaacttgcgtctacaccattccacaagcttccagtggagtcagtgcacattttagaagataaagaaaatgtggtagcaaaacagtgtacccaggcgactttggattcttgtgaggaaaacatggtggtgccttcaagggatggaaaattcagtccaattcaagagaaaagcccaaaacaggccttgtcgtctcacatgtattcagcatccttacttcgtctgagccagcctgctgcaggtggggtacttacctgtgaggcagagttgggcgttgaggcttgcagactcacagacactgacgctgccattgcagaagatccaccagatgctattgctgggctccaagcagaatggatgcagatgagttcacttgggactgttgatgctccaaacttcattgttgggaacccatgggatgataagctgattttcaaacttttatctgggctttctaaaccagtgagttcctatccaaatacttttgaatggcaatgtaaacttccagccatcaagcccaagactgaatttcaattgggttctaagctggtctatgtccatcaccttcttggagaaggagcctttgcccaggtgtacgaagctacccagggagatctgaatgatgctaaaaataaacagaaatttgttttaaaggtccaaaagcctgccaacccctgggaattctacattgggacccagttgatggaaagactaaagccatctatgcagcacatgtttatgaagttctattctgcccacttattccagaatggcagtgtattagtaggagagctctacagctatggaacattattaaatgccattaacctctataaaaatacccctgaaaaagtgatgcctcaaggtcttgtcatctcttttgctatgagaatgctttacatgattgagcaagtgcatgactgtgaaatcattcatggagacattaaaccagacaatttcatacttggaaacggatttttggaacaggatgatgaagatgatttatctgctggcttggcactgattgacctgggtcagagtatagatatgaaactttttccaaaaggaactatattcacagcaaagtgtgaaacatctggttttcagtgtgttgagatgctcagcaacaaaccatggaactaccagatcgattactttggggttgctgcaacagtatattgcatgctctttggcacttacatgaaagtgaaaaatgaaggaggagagtgtaagcctgaaggtctttttagaaggcttcctcatttggatatgtggaatgaattttttcatgttatgttgaatattccagattgtcatcatcttccatctttggatttgttaaggcaaaagctgaagaaagtatttcaacaacactatactaacaagattagggccctacgtaataggctaattgtactgctcttagaatgtaagcgttcacgaaaataaaatttggatatagacagtccttaaaaatcacactgtaaatatgaatctgctcactttaaacctgtttttttttcatttattgtttatgtaaatgtttgttaaaaataaatcccatggaatatttccatgtaaaaaaaaa

SEQ ID NO: 128 - DNA, 3090 bp, Homo sapiens
agaggcttccctggctggtgcctgagcccggcgtccctcgccccccgccctccccgcatccctctcctccctcgcgcctggccctgtggctcttcctccctccctccttccccccccccccacccctcgcccgctgcctccctcggcccagccagctgtgccggcgtttgttggctgccctgcgcccggccctccagccagccttctgccggccccgccgcgatggaggtgccccagccggagcccgcgccaggctcggctctcagtccagcaggcgtgtgcggtggcgcccagcgtccgggccacctcccgggcctcctgctgggatctcatggcctcctggggtccccggtgcgggcggccgcttcctcgccggtcaccaccctcacccagaccatgcacgacctcgccgggctcggcagccgcagccgcctgacgcacctatccctgtctcgacgggcatccgaatcctccctgtcgtctgaatcctccgaatcttctgatgcaggtctctgcatggattcccccagccctatggacccccacatggcggagcagacgtttgaacaggccatccaggcagccagccggatcattcgaaacgagcagtttgccatcagacgcttccagtctatgccggtgaggctgctgggccacagccccgtgcttcggaacatcaccaactcccaggcgcccgacggccggaggaagagcgaggcgggcagtggagctgccagcagctctggggaagacaaggagaatgatggatttgtcttcaagatgccatggaagcccacacatcccagctccacccatgctctggcagagtgggccagccgcagggaagcctttgcccagagacccagctcggcccccgacctgatgtgtctcagtcctgaccggaagatggaagtggaggagctcagccccctggccctaggtcgcttctctctgacccctgcagagggggatactgaggaagatgatggatttgtggacatcctagagagtgacttaaaggatgatgatgcagttcccccaggcatggagagtctcattagtgccccactggtcaagaccttggaaaaggaagaggaaaaggacctcgtcatgtacagcaagtgccagcggctcttccgctctccgtccatgccctgcagcgtgatccggcccatcctcaagaggctggagcggccccaggacagggacacgcccgtgcagaataagcggaggcggagcgtgacccctcctgaggagcagcaggaggctgaggaacctaaagcccgcgtcctccgctcaaaatcactgtgtcacgatgagatcgagaacctcctggacagtgaccaccgagagctgattggagattactctaaggccttcctcctacagacagtagacggaaagcaccaagacctcaagtacatctcaccagaaacgatggtggccctattgacgggcaagttcagcaacatcgtggataagtttgtgattgtagactgcagatacccctatgaatatgaaggcgggcacatcaagactgcggtgaacttgcccctggaacgcgacgccgagagcttcctactgaagagccccatcgcgccctgtagcctggacaagagagtcatcctcattttccactgtgaattctcatctgagcgtgggccccgcatgtgccgtttcatcagggaacgagaccgtgctgtcaacgactaccccagcctctactaccctgagatgtatatcctgaaaggcggctacaaggagttcttccctcagcacccgaacttctgtgaaccccaggactaccggcccatgaaccacgaggccttcaaggatgagctaaagaccttccgcctcaagactcgcagctgggctggggagcggagccggcgggagctctgtagccggctgcaggaccagtgaggggcctgcgccagtcctgctacctcccttgcctttcgaggcctgaagccagctgccctatgggcctgccgggctgagggcctgctggaggcctcaggtgctgtccatgggaaagatggtgtggtgtcctgcctgtctgccccagcccagattcccctgtgtcatcccatcattttccatatcctggtgccccccacccctggaagagcccagtctgttgagttagttaagttgggttaataccagcttaaaggcagtattttgtgtcctccaggagcttcttgtttccttgttagggttaacccttcatcttcctgtgtcctgaaacgctcctttgtgtgtgtgtcagctgaggctggggagagccgtggtccctgaggatgggtcagagctaaactccttcctggcctgagagtcagctctctgccctgtgtacttcccgggccagggctgcccctaatctctgtaggaaccgtggtatgtctgccatgttgcccctttctcttttcccctttcctgtcccaccatacgagcacctccagcctgaacagaagctcttactctttcctatttcagtgttacctgtgtgcttggtctgtttgactttacgcccatctcaggacacttccgtagactgtttaggttcccctgtcaaatatcagttacccactcggtcccagttttgttgccccagaaagggatgttattatccttgggggctcccagggcaagggttaaggcctgaatcatgagcctgctggaagcccagcccctactgctgtgaaccctggggcctgactgctcagaacttgctgctgtcttgttgcggatggatggaaggttggatggatgggtggatggccgtggatggccgtggatgcgcagtgccttgcatacccaaaccaggtgggagcgttttgttgagcatgacacctgcagcaggaatatatgtgtgcctatttgtgtggacaaaaatatttacacttagggtttggagctattcaagaggaaatgtcacagaagcagctaaaccaaggactgagcaccctctggattctgaatctcaagatgggggcagggctgtgcttgaaggccctgctgagtcatctgttagggccttggttcaataaagcactgagcaagttgagaaaaaaaaaaaaaaaaaaa

SEQ ID NO: 129 - DNA, 2576 bp, Homo sapiens
gaattccgggcgacgcgcgggaacaacgcgagtcggcgcgcgggacgaagaataatcatgggccagactgggaagaaatctgagaagggaccagtttgttggcggaagcgtgtaaaatcagagtacatgcgactgagacagctcaagaggttcagacgagctgatgaagtaaagagtatgtttagttccaatcgtcagaaaattttggaaagaacggaaatcttaaaccaagaatggaaacagcgaaggatacagcctgtgcacatcctgacttctgtgagctcattgcgcgggactagggagtgttcggtgaccagtgacttggattttccaacacaagtcatcccattaaagactctgaatgcagttgcttcagtacccataatgtattcttggtctcccctacagcagaattttatggtggaagatgaaactgttttacataacattccttatatgggagatgaagttttagatcaggatggtactttcattgaagaactaataaaaaattatgatgggaaagtacacggggatagagaatgtgggtttataaatgatgaaatttttgtggagttggtgaatgcccttggtcaatataatgatgatgacgatgatgatgatggagacgatcctgaagaaagagaagaaaagcagaaagatctggaggatcaccgagatgataaagaaagccgcccacctcggaaatttccttctgataaaattttggaggccatttcctcaatgtttccagataagggcacagcagaagaactaaaggaaaaatataaagaactcaccgaacagcagctcccaggcgcacttcctcctgaatgtacccccaacatagatggaccaaatgctaaatctgttcagagagagcaaagcttacactcctttcatacgcttttctgtaggcgatgttttaaatatgactgcttcctacatccttttcatgcaacacccaacacttataagcggaagaacacagaaacagctctagacaacaaaccttgtggaccacagtgttaccagcatttggagggagcaaaggagtttgctgctgctctcaccgctgagcggataaagaccccaccaaaacgtccaggaggccgcagaagaggacggcttcccaataacagtagcaggcccagcacccccaccattaatgtgctggaatcaaaggatacagacagtgatagggaagcagggactgaaacggggggagagaacaatgataaagaagaagaagagaagaaagatgaaacttcgagctcctctgaagcaaattctcggtgtcaaacaccaataaagatgaagccaaatattgaacctcctgagaatgtggagtggagtggtgctgaagcctcaatgtttagagtcctcattggcacttactatgacaatttctgtgccattgctaggttaattgggaccaaaacatgtagacaggtgtatgagtttagagtcaaagaatctagcatcatagctccagctcccgctgaggatgtggatactcctccaaggaaaaagaagaggaaacaccggttgtgggctgcacactgcagaaagatacagctgaaaaaggacggctcctctaaccatgtttacaactatcaaccctgtgatcatccacggcagccttgtgacagttcgtgcccttgtgtgatagcacaaaatttttgtgaaaagttttgtcaatgtagttcagagtgtcaaaaccgctttccgggatgccgctgcaaagcacagtgcaacaccaagcagtgcccgtgctacctggctgtccgagagtgtgaccctgacctctgtcttacttgtggagccgctgaccattgggacagtaaaaatgtgtcctgcaagaactgcagtattcagcggggctccaaaaagcatctattgctggcaccatctgacgtggcaggctgggggatttttatcaaagatcctgtgcagaaaaatgaattcatctcagaatactgtggagagattatttctcaagatgaagctgacagaagagggaaagtgtatgataaatacatgtgcagctttctgttcaacttgaacaatgattttgtggtggatgcaacccgcaagggtaacaaaattcgttttgcaaatcattcggtaaatccaaactgctatgcaaaagttatgatggttaacggtgatcacaggataggtatttttgccaagagagccatccagactggcgaagagctgtttgttgattacagatacagccaggctgatgccctgaagtatgtcggcatcgaaagagaaatggaaatcccttgacatctgctacctcctccccctcctctgaaacagctgccttagcttcaggaacctcgagtactgtgggcaatttagaaaaagaacatgcagtttgaaattctgaatttgcaaagtactgtaagaataatttatagtaatgagtttaaaaatcaactttttattgccttctcaccagctgcaaagtgttttgtaccagtgaatttttgcaataatgcagtatggtacatttttcaactttgaataaagaatacttgaacttgaaaaaaaaaaaaaaaaaa

SEQ ID NO: 130 - DNA, 3280 bp, Homo sapiens
  misc_feature (4)..(4): n is a, c, g, or t
  misc_feature (36)..(36): n is a, c, g, or t
  misc_feature (50)..(50): n is a, c, g, or t
  misc_feature (56)..(56): n is a, c, g, or t
  misc_feature (60)..(60): n is a, c, g, or t
ggcncgacccgagcagccggttccctcctctccagnccccctcctcattncacccncgcngcctggcccagcgacccgtcccttcgtctccccgcggaatggggccggcactgctcagggtcgcgcgccctggacccagctcgctctcggtctcgcgctgtcaggactgcccggctcgcgccgcctcgcgctctgcctcagtcagtggcccgaacgtccgttaagcggcggcgcggttcctgtttccgtttcttcctctccgttcggtcgggagtagcatcctccactcagccacccttcccactcccccatcgtggggcagctgcggctgagggctgtggctttggcagctgcgacggggagcggcggagaccgtctgctcccgcctggggttgctgcttttgctcagaggacatccatgaccctaatggtctttttgttcaagataaagtgattttttgcctttgttgattaactggacaaattcagcatgtagagcgcatgaagtacaggacaataaagcttcctacacatatcaccaggaggatctctttgaaagattcactgcaggactaccagagagaataatttgtctgaagcatcatgtgttgaaacaacagaagtctattcacctgtgcactaactagaaacagagttacaatgttttcaattctttgagctccaggactccagggaagtgagttgaaaatctgaaaatgcggccatggactggttcctggcgttggattatgctcattctttttgcctgggggaccttgctgttttatataggtggtcacttggtacgagataatgaccatcctgatcactctagccgagaactgtccaagattctggcaaagcttgaacgcttaaaacagcagaatgaagacttgaggcgaatggccgaatctctccggataccagaaggccctattgatcaggggccagctataggaagagtacgcgttttagaagagcagcttgttaaggccaaagaacagattgaaaattacaagaaacagaccagaaatggtctggggaaggatcatgaaatcctgaggaggaggattgaaaatggagctaaagagctctggtttttcctacagagtgaattgaagaaattaaagaacttagaaggaaatgaactccaaagacatgcagatgaatttcttttggatttaggacatcatgaaaggtctataatgacggatctatactacctcagtcagacagatggagcaggtgattggcgggaaaaagaggccaaagatctgacagaactggttcagcggagaataacatatcttcagaatcccaaggactgcagcaaagccaaaaagctggtgtgtaatatcaacaaaggctgtggctatggctgtcagctccatcatgtggtctactgcttcatgattgcatatggcacccagcgaacactcatcttggaatctcagaattggcgctatgctactggtggatgggagactgtatttaggcctgtaagtgagacatgcacagacagatctggcatctccactggacactggtcaggtgaagtgaaggacaaaaatgttcaagtggtcgagcttcccattgtagacagtcttcatccccgtcctccatatttacccttggctgtaccagaagacctcgcagatcgacttgtacgagtgcatggtgaccctgcagtgtggtgggtgtctcagtttgtcaaatacttgatccgcccacagccttggctagaaaaagaaatagaagaagccaccaagaagcttggcttcaaacatccagttattggagtccatgtcagacgcacagacaaagtgggaacagaagctgccttccatcccattgaagagtacatggtgcatgttgaagaacattttcagcttcttgcacgcagaatgcaagtggacaaaaaaagagtgtatttggccacagatgacccttctttattaaaggaggcaaaaacaaagtaccccaattatgaatttattagtgataactctatttcctggtcagctggactgcacaatcgatacacagaaaattcacttcgtggagtgatcctggatatacattttctctctcaggcagacttcctagtgtgtactttttcatcccaggtctgtcgagttgcttatgaaattatgcaaacactacatcctgatgcctctgcaaacttccattctttagatgacatctactattttgggggccagaatgcccacaatcaaattgccatttatgctcaccaaccccgaactgcagatgaaattcccatggaacctggagatatcattggtgtggctggaaatcattgggatggctattctaaaggtgtcaacaggaaattgggaaggacgggcctatatccctcctacaaagttcgagagaagatagaaacggtcaagtaccccacatatcctgaggctgagaaataaagctcagatggaagagataaacgaccaaactcagttcgaccaaactcagttcaaaccatttgagccaaactgtagatgaagagggctctgatctaacaaaataaggttatatgagtagatactctcagcaccaagagcagctgggaactgacataggcttcaattggtggaattcctctttaacaagggctgcaatgcctcatacccatgcacagtacaataatgtactcacatataacatgcaaacaggttgttttctactttgcccctttcagtatgtccccataagacaaacactgccatattgtgtaatttaagtgacacagacattttgtgtgagacttaaaacatggtgcctatatctgagagacctgtgtgaactattgagaagatcggaacagctccttactctgaggaagttgattcttatttgatggtggtattgtgaccactgaattcactccagtcaacagattcagaatgagaatggacgtttggtttttttttgtttttgtttttgttttttcctttataaggttgtctgtttttttttttttaaataattgcatcagttcattgacctcatcattaataagtgaagaatacatcagaaaataaaatattcactctccattagaaaattttgtaaaacaatgccatgaacaaattctttagtactcaatgtttctggacattctctttgataacaaaaaataaattttaaaaaggaattttgtaaaagtttctagaattttatatcattggatgatatgttgatcagccttatgtggaagaactgtgataaaaagaggagctttttagtttttcaaaaaaaa

SEQ ID NO: 131 - DNA, 2584 bp, Homo sapiens
tggcggcggcggcggcggttgtcccggctgtgccggttggtgtggcccgtcagcccgcgtaccacagcgcccgggccgcgtcgagcccagtacagccaagccgctgcggccgggtccggcgcgggcggcgcgcgcagacggagggcggcggccgcggccagggcggcccgtgggaccgcgggcccccggcgcagcgctgcccggctcccggccctgccggcctcctcccttggcgccgcggccatggcggccagcgcgaagcggaagcaggaggagaagcacctgaagatgctgcgggacatgaccggcctcccgcgcaaccgaaagtgcttcgactgcgaccagcgcggccccacctacgttaacatgacggtcggctccttcgtgtgtacctcctgctccggcagcctgcgaggattaaatccaccacacagggtgaaatctatctccatgacaacattcacacaacaggaaattgaattcttacaaaaacatggaaatgaagtctgtaaacagatttggctaggattatttgatgatagatcttcagcaattccagacttcagggatccacaaaaagtgaaagagtttctacaagaaaagtatgaaaagaaaagatggtatgtcccgccagaacaagccaaagtcgtggcatcagttcatgcatctatttcagggtcctctgccagtagcacaagcagcacacctgaggtcaaaccactgaaatctcttttaggggattctgcaccaacactgcacttaaataagggcacacctagtcagtccccagttgtaggtcgttctcaagggcagcagcaggagaagaagcaatttgaccttttaagtgatctcggctcagacatctttgctgctccagctcctcagtcaacagctacagccaattttgctaactttgcacatttcaacagtcatgcagctcagaattctgcaaatgcagattttgcaaactttgatgcatttggacagtctagtggttcgagtaattttggaggtttccccacagcaagtcactctccttttcagccccaaactacaggtggaagtgctgcatcagtaaatgctaattttgctcattttgataacttccccaaatcctccagtgctgattttggaaccttcaatacttcccagagtcatcaaacagcatcagctgttagtaaagtttcaacgaacaaagctggtttacagactgcagacaaatatgcagcacttgctaatttagacaatatcttcagtgccgggcaaggtggtgatcagggaagtggctttgggaccacaggtaaagctcctgttggttctgtggtttcagttcccagtcagtcaagtgcatcttcagacaagtatgcagctctggcagaactagacagcgttttcagttctgcagccacctccagtaatgcgtatacttccacaagtaatgctagcagcaatgtttttggaacagtgccagtggttgcttctgcacagacacagcctgcttcatcaagtgtgcctgctccatttggacgtacgccttccacaaatccatttgttgctgctgctggtccttctgtggcatcttctacaaacccatttcagaccaatgccagaggagcaacagcggcaacctttggcactgcatccatgagcatgcccacgggattcggcactcctgctccctacagtcttcccaccagctttagtggcagctttcagcagcctgcctttccagcccaagcagctttccctcaacagacagctttttctcaacagcccaatggtgcaggttttgcagcatttggacaaacaaagccagtagtaaccccttttggtcaagttgcagctgctggagtatctagtaatccttttatgactggtgcaccaacaggacaatttccaacaggaagctcatcaaccaatcctttcttatagccttatatagacaatttactggaacgaacttttatgtggtcacattacatctctccacctcttgcactgttgtcttgtttcactgatcttagctttaaacacaagagaagtctttaaaaagcctgcattgtgtattaaacaccaggtaatatgtgcaaaaccgagggctccagtaacaccttctaacctgtgaattggcagaaaagggtagcggtatcatgtatattaaaattggctaatattaagttattgcagataccacattcattatgctgcagtactgtacatatttttcttagaaattagctatttgtgcatatcagtatttgtaactttaacacattgttatgtgagaaatgttactggggaaatagatcagccacttttaaggtgctgtcatatatcttggaatgaatgacctaaaatcattttaaccattgctactggaaagtaacagagtcaaaattggaaggttttattcattcttgaatttttcctttctaaagagctcttctatttatacatgcctaaattcttttaaaatgtagagggatacctgtctgcataataaagctgatcatgttttgctacagtttgcaggtgaaaaaaaataaatattataaaataaaaaaaaaaaaaaagaaaaaaaaaa

SEQ ID NO: 132 - DNA, 2088 bp, Homo sapiens
catgaaggaccgaacccaggagctccgcacggccaaggacagcgatgatgatgatgatgtcgctgtcaccgtggaccgagaccgcttcatggatgagttctttgagcaggtggaggagattcgaggcttcattgacaagatcgcagagaacgtggaggaggtgaagcggaagcacagtgccatcctggcatcccccaaccccgatgagaagacgaaggaggagctggaagaactcatgtccgacataaagaagacagcaaacaaagttcgttccaagttaaagagcatcgagcagtccatcgagcaagaggaaggcctgaaccgctcctccgctgacctgaggatccggaagacacagcactccacgctgtccagaaagtttgtggaggtcatgtcggagtacaacgccacgcagtccgactaccgcgagcgctgcaaaggccgcatccagaggcagctggagatcaccggcaggaccacgaccagtgaggagctggaggacatgctggagagtgggaaccccgccatctttgcctctgggatcatcatggactccagcatctcgaagcaggctctgagcgagattgagacgcggcacagtgagatcatcaagctggagaacagcatccgtgagctacacgacatgttcatggacatggccatgctcgtggagagccagggagagatgattgacaggatcgagtacaatgtggaacacgcggtagactatgtggagagggccgtgtctgacaccaagaaggccgtcaagtaccagagcaaggcgcgccggaagaaaatcatgatcatcatctgctgtgtgatcctgggcatcgtcatcgcctccactgttgggggcatcttcgcctagaagccacccaaactgccactccactccaggtgggccactccaaggaggccctggctgctgccacctggctgggctgccctcccaacccccgcctctggctcagagcaccctccctcccggcccccatgctcccttctctgccatgggccctccgtccccgccccgtgtcgtgtgcatgatctctgtgagtgtgcgtctgtacgggaagaggcagagggaggcagccagcggggcgtgatgcagtgtgcacagcgaggagcagacccaggcagggccgccagggtgacacaggccacgcttccttgccttcagtaactcggtgggcccaggttctgctcttccctggggaccctaacctcgcctccagctgacctgccctgtcctctccagctgtccccacaagcagagccctgaggggtggggaccagctggccacatggtgctgcttttcaggttaggggagaggtgaccctgagggacagcccagctctgagtctcagtcgctgatcactgccagggaggctcaggctgccatggctccaggctccctcccctgcctaggggcaaagtccatcgggtcctgggcctcagcttcccttcccacattcctccggccccaggagcaaccccttgggctaggtctgaccccaggtgtccctctggaaggggctggctggtgccctatttccagccaccccagcagctagggaggcaaagcaggctgcagtcagtccctcaagccagcgttgcatgtttgggatggtggctcctgttgtcttgcgctctgggaagtcagatgtcatttcaggcctgcagtctcatcctgcccttgccatcctcccatcgatgtgccacgtgggtgtcacgtgtcccagatgcagtattcggcagccagccggggagggctacctcctcctcctcaccaccttggggcttctcatgggaaatgtgcccccgccccaggaccctctcccttgtggacaggcagggagatgcatgcgagtgcatgcagcaggggatggggccgtgtccgtgtgccccaccctccctcggctttactcctgcccagtgactgtgaccactgtccgtgttgccttcttgaacagcgattccccccaaccccttcaccaaaggtcttggtacaaccagctgcccattttgtgaaatttttatgtagaataaacatttgtatctgtaaaaaaaaaaaaaaaaaagcgttc

SEQ ID NO: 133 - DNA, 1530 bp, Homo sapiens
aatcctggaacaaggctacagcgtcgaagatccccagcgctgcgggctcggagagcagtcctaacggcgcctcgtacgctagtgtcctcccttttcagtccgcgtccctccctgggccgggctggcactcttgccttccccgtccctcatggcgctgctccgacgcccgacggtgtccagtgatttggagaatattgacacaggagttaattctaaagttaagagtcatgtgactattaggcgaactgttttagaagaaattggaaatagagttacaaccagagcagcacaagtagctaagaaagctcagaacaccaaagttccagttcaacccaccaaaacaacaaatgtcaacaaacaactgaaacctactgcttctgtcaaaccagtacagatggaaaagttggctccaaagggtccttctcccacacctgaggatgtctccatgaaggaagagaatctctgccaagctttttctgatgccttgctctgcaaaatcgaggacattgataacgaagattgggagaaccctcagctctgcagtgactacgttaaggatatctatcagtatctcaggcagctggaggttttgcagtccataaacccacatttcttagatggaagagatataaatggacgcatgcgtgccatcctagtggattggctggtacaagtccactccaagtttaggcttctgcaggagactctgtacatgtgcgttggcattatggatcgatttttacaggttcagccagtttcccggaagaagcttcaattagttgggattactgctctgctcttggcttccaagtatgaggagatgttttctccaaatattgaagactttgtttacatcacagacaatgcttataccagttcccaaatccgagaaatggaaactctaattttgaaagaattgaaatttgagttgggtcgacccttgccactacacttcttaaggcgagcatcaaaagccggggaggttgatgttgaacagcacactttagccaagtatttgatggagctgactctcatcgactatgatatggtgcattatcatccttctaaggtagcagcagctgcttcctgcttgtctcagaaggttctaggacaaggaaaatggaacttaaagcagcagtattacacaggatacacagagaatgaagtattggaagtcatgcagcacatggccaagaatgtggtgaaagtaaatgaaaacttaactaaattcatcgccatcaagaataagtatgcaagcagcaaactcctgaagatcagcatgatccctcagctgaactcaaaagccgtcaaagaccttgcctccccactgataggaaggtcctaggctgccgtgggccctggggatgtgtgcttcattgtgccctttttcttattggtttagaactcttgattttgtacatagtcctctggtctatctcatgaaacctcttctcagaccagttttctaaacatatattgaggaaaaataaagcgattggtttttcttaaggtaaaaaaaaaaaaaaaaaa

SEQ ID NO: 134 - DNA, 2648 bp, Homo sapiens
ggcacagggcgaggttttatacacctgaaagaagagaatgtcaagacgaagtagccgtttacaagctaagcagcagccccagcccagccagacggaatccccccaagaagcccagataatccaggccaagaagaggaaaactacccaggatgtcaaaaaaagaagagaggaggtcaccaagaaacatcagtatgaaattaggaattgttggccacctgtattatctggggggatcagtccttgcattatcattgaaacacctcacaaagaaataggaacaagtgatttctccagatttacaaattacagatttaaaaatctttttattaatccttcacctttgcctgatttaagctggggatgttcaaaagaagtctggctaaacatgttaaaaaaggagagcagatatgttcatgacaaacattttgaagttctgcattctgacttggaaccacagatgaggtccatacttctagactggcttttagaggtatgtgaagtatacacacttcatagggaaacattttatcttgcacaagacttttttgatagatttatgttgacacaaaaggatataaataaaaatatgcttcaactcattggaattacctcattattcattgcttccaaacttgaggaaatctatgctcctaaactccaagagtttgcttacgtcactgatggtgcttgcagtgaagaggatatcttaaggatggaactcattatattaaaggctttaaaatgggaactttgtcctgtaacaatcatctcctggctaaatctctttctccaagttgatgctcttaaagatgctcctaaagttcttctacctcagtattctcaggaaacattcattcaaatagctcagcttttagatctgtgtattctagccattgattcattagagttccagtacagaatactgactgctgctgccttgtgccattttacctccattgaagtggttaagaaagcctcaggtttggagtgggacagtatttcagaatgtgtagattggatggtaccttttgtcaatgtagtaaaaagtactagtccagtgaagctgaagacttttaagaagattcctatggaagacagacataatatccagacacatacaaactatttggctatgctggaggaagtaaattacataaacaccttcagaaaagggggacagttgtcaccagtgtgcaatggaggcattatgacaccaccgaagagcactgaaaaaccaccaggaaaacactaaagaagataactaagcaaacaagttggaattcaccaagattgggtagaactggtatcactgaactactaaagttttacagaaagtagtgctgtgattgattgccctagccaattcacaagttacactgccattctgattttaaaacttacaattggcactaaagaatacatttaattatttcctatgttagctgttaaagaaacagcaggacttgtttacaaagatgtcttcattcccaaggttactggatagaagccaaccacagtctataccatagcaatgtttttcctttaatccagtgttactgtgtttatcttgataaactaggaattttgtcactggagttttggactggataagtgctaccttaaagggtatactaagtgatacagtactttgaatctagttgttagattctcaaaattcctacactcttgactagtgcaatttggttcttgaaaattaaatttaaacttgtttacaaaggtttagttttgtaataaggtgactaatttatctatagctgctatagcaagctattataaaacttgaatttctacaaatggtgaaatttaatgttttttaaactagtttatttgccttgccataacacattttttaactaataaggcttagatgaacatggtgttcaacctgtgctctaaacagtgggagtaccaaagaaattataaacaagataaatgctgtggctccttcctaactggggctttcttgacatgtaggttgcttggtaataacctttttgtatatcacaatttgggtgaaaaacttaagtaccctttcaaactatttatatgaggaagtcactttactactctaagatatccctaaggaatttttttttttaatttagtgtgactaaggctttatttatgtttgtgaaactgttaaggtcctttctaaattcctccattgtgagataaggacagtgtcaaagtgataaagcttaacacttgacctaaacttctattttcttaaggaagaagagtattaaatatatactgactcctagaaatctatttattaaaaaaagacatgaaaacttgctgtacataggctagctatttctaaatattttaaattagcttttctaaaaaaaaaatccagcctcataaagtagattagaaaactagattgctagtttattttgttatcagatatgtgaatctcttctccctttgaagaaactatacatttattgttacggtatgaagtcttctgtatagtttgtttttaaactaatatttgtttcagtattttgtctgaaaagaaaacaccactaattgtgtacatatgtattatataaacttaaccttttaatactgtttatttttagcccattgtttaaaaaataaaagttaaaaaaatttaaaaa

SEQ ID NO: 135 - DNA, 4724 bp, Homo sapiens
atccggggcagcggggaatggctgagccaggggttcgccgcccccgccgccgccgccgccgccgccgccgccgccgccgcccgctttcggctcgggcctcaggaccgtagcatcctgagacattttgaattgacacttctcaagatttgactggatcagagttcatcatgtcaaagttgaaaagctcagagtcagtcagggtggtggttcgctgtcggcccatgaatggcaaggaaaaggctgcttcgtatgacaaagtggtggatgtggatgttaagctggggcaggtgtctgtgaagaaccccaaagggacggcccatgaaatgcccaagaccttcacctttgatgccgtctatgactggaatgccaagcagtttgaactgtacgatgagacgttccgaccacttgttgactctgtcctgcaaggtttcaatggaaccatttttgcctatggacaaactgggacaggaaaaacctacaccatggaaggaatccgtggtgaccctgaaaaaagaggagtcattcctaactcatttgaccatatcttcacccacatctctcgatcccagaatcaacaatacctggtcagggcttcttacttagagatctaccaggaggagatccgagatttgctctcaaaggatcagaccaaaaggcttgagctcaaagagaggcctgacacaggagtgtatgtgaaagacctgtcttcctttgtcaccaagagtgtgaaggagatagagcatgtgatgaatgtggggaaccagaaccgttctgtcggtgctaccaacatgaacgagcacagctcgcgttctcatgcaattttcgttatcactattgagtgcagcgaggtgggcctcgatggtgaaaaccacatccgtgtaggaaaattgaaccttgtagatcttgctggcagcgaacggcaagccaagaccggcgcacaaggggagagattaaaagaagctaccaagatcaacctctccctttccgctttgggtaatgtcatctctgctctagtggacggcaaaagcactcacattccatatcgggactcaaagcttaccaggctcctccaagattcccttggtggcaatgccaagactgtgatggtggccaacgtggggcctgcctcttacaacgtagaagagactctgaccactctgcgatatgccaaccgtgccaaaaacattaagaacaaaccaagggtcaatgaggaccccaaggatgccctccttcgagaattccaggaagagattgctcggctcaaggcccagctggaaaaacggtccattggtaggaggaagaggcgagagaagcggagggaaggtggtggcagtggtgggggtggggaagaggaggaggaggagggagaagagggtgaggaggaaggggatgataaggatgattactggcgggaacagcaagaaaaactggagattgagaagcgggccattgtagaggatcacagcttggttgcagaggagaagatgaggctgctgaaggagaaagagaaaaagatggaggacctgcggcgggagaaggatgctgccgagatgctgggcgccaagatcaaggccatggagagtaagttgcttgttggaggaaaaaatatagtagatcatacgaatgaacagcagaaaatcctggagcagaaacgacaggaaattgcagagcagaaacgtcgagaaagagaaatccagcaacagatggaaagtcgagatgaggagaccttggaacttaaagagacatacagctcattgcagcaagaggtggacatcaagaccaaaaaactcaaaaagctcttctccaagcttcaggcagtgaaggctgagatccatgacctccaagaagaacacatcaaggagcgccaagagctagagcagactcagaatgagctcaccagggagctgaaactcaagcatcttattatagaaaactttatccctctggaagaaaaaagtaaaattatgaatagagccttctttgatgaagaggaagatcattggaaactacatcctataaccagactggagaaccagcagatgatgaagcggccagtctcagccgtgggatataagagaccattgagccagcacgcaagaatgtccatgatgattcgtccagaggcccgatacagggcagaaaacattgtgctgttagagctggacatgcccagccggaccaccagagactatgagggtccagccattgcccccaaggtccaggctgcattggatgcggctctgcaggatgaagatgagatacaggtggatgcatcatcatttgaaagcactgcaaataagaaatccaaggccaggcctaaaagtggaaggaagtcgggatcctcctcctcttcctcaggaacccctgcatctcagctttatccacagtctcgggggctggttccaaagtaaagccagcttctcctctcccagggcggaaacagcatttgccttctgagagaagagactagcgaaaagctgcagagaggattcggcccaaactcagaactgttcccctgaggagaagcggtggcctctttgcagatcaaccaacttaatctggttgaacgtgctgttcctaatctggcactcagcccctctgggaaacatcttttaattagcatctcagaaatgcatgggtaaggtaaagtgcgatagttcaagtggaaagcaagagaatgaccagtgaccttgcttccttcccccttgccttcttctcccccttcccctgtgctccctttctctcctctctccttttctagcctgttctttacatggggctcccttcttgttgaacaatagggcagaatcaggagtcaccttagcaggaccacatctttggagcctcgggataaaatgacagtgaggttgaaaagtgaaaaccctagaacttgaataggtgcctgttcttgtagggagaaatgagaaatcgcatttggatccaggccccaggtgggcaccatcagcagtcttgcttccatgcacctcagtaagaagtggatctgcctttgggacctgctcagtgaggaaatctcttccaatttctgcttctgaatgattcaatgttgggagcaatagaaataacattccctttgccttctctgagtgtttagggaaatagcttctttaaaacctcaaaaccatgaccatcctgtcaaagacctaagtctgtaagctggtgccatgtccatacaccatgtcactttactcttcatttgtcaccatcttttcccatgcacgcatactctgaacatccttgtgtgggcccatcctctgcatccagagcatgctctgcagtgggcctgttttgtggaagaaaggaggctgtctctgccttctctgatgggactggagttgagggaaggagctgtattgtggcacttctgaattccccgttttgttccatattggtatagagagcagaagagtagctaggcagatgcagagatggagacatgagactcagtgcagtgggcagggaagacataacagatggaagcaaaggaatcctgcctgccttcagcagagaattcaccgaatcctagaactgtggctccctccaggcagagcctaagatgctggtgaagaatagctgtgtgattgaataggctcaaaggagagttcagaattcccatttacatattactagtttggtttgtaagttttagttccttgtattattgagattcagagcttcattttatgttggtcattaggtgaatattactcattttccctcaagagaagctcataagtgtgtgtgggtgtgagagcacgatggtgcctgtgttctgtgaatgtgtccatatgtgtctgtaagagagacagagaccaagaacttgcccaattttagaaatacactaatgtgcagttgttgccttttgtctgtattgaaggcccattgaatgactaatccaggctggaagcattcccatgtgggtgtctgagtccatgagccaagcctgaggggacagtgagtctccaggtctgccacactggtgcaccttgctggcacggtgcctcaggaaggtggcgactcaggtgggccttgagttatattttaactcagctgctcagttcccagggcacatttctggatcagaacccatgggaaacaggaggtactaagtgcaatgtcttagcattctgcaaaatggagatctgttgtccagcggcttatctcctttttagtaacccttctttctgaacccagggcccttttcagccttccctcatattttcttgagatcaaactttacttctttcttatttactaagaatttgcctgtttgaataagaacaaaacgctaaggtgggtagcctaagctgattttctgctggttacacgtgtctctcacaccacatttcctcaaagctaatctgaattctgtaggctaaaaatattcatgtagcaaatctgagaattgaaaactgcagataaccggccgggtatggtgactcatgcctgtaatcctggcactttgggaggccgaggtgggtggaccacctgaggttaggacttcgagaccagcctggccaacatggtggaaccccgtctgtactaaaagtgcaaaggtttgcctggtgtggtggtgcatgcctctagtcctggctactcgggaggctgaggcacgagaatcgcttgggcctgggaggcggaggttgcagtgagtcgagataacactactgcattccagcctgggtgacagagtgagactccacctc

SEQ ID NO: 136 - DNA, 2864 bp, Homo sapiens
ccagcggccgccgacgctaggaggccgcgctccgcccccgctaccatgaggccccggaaagccttcctgctcctgctgctcttggggctggtgcagctgctggccgtggcgggtgccgagggcccggacgaggattcttctaacagagaaaatgccattgaggatgaagaggaggaggaggaggaagatgatgatgaggaagaagacgacttggaagttaaggaagaaaatggagtcttggtcctaaatgatgcaaactttgataattttgtggctgacaaagacacagtgctgctggagttttatgctccatggtgtggacattgcaagcagtttgctccggaatatgaaaaaattgccaacatattaaaggataaagatcctcccattcctgttgccaagatcgatgcaacctcagcgtctgtgctggccagcaggtttgatgtgagtggctaccccaccatcaagatccttaagaaggggcaggctgtagactacgagggctccagaacccaggaagaaattgttgccaaggtcagagaagtctcccagcccgactggacgcctccaccagaagtcacgcttgtgttgaccaaagagaactttgatgaagttgtgaatgatgcagatatcattctggtggagttttatgccccatggtgtggacactgcaagaaacttgcccccgagtatgagaaggccgccaaggagctcagcaagcgttctcctccaattcccctggcaaaggtcgacgccaccgcagaaacagacctggccaagaggtttgatgtctctggctatcccaccctgaaaattttccgcaaaggaaggccttatgactacaacggcccacgagaaaaatatggaatcgttgattacatgatcgagcagtccgggcctccctccaaggagattctgaccctgaagcaggtccaggagttcctgaaggatggagacgatgtcatcatcatcggggtctttaagggggagagtgacccagcctaccagcaataccaggatgccgctaacaacctgagagaagattacaaatttcaccacactttcagcacagaaatagcaaagttcttgaaagtctcccaggggcagttggttgtaatgcagcctgagaaattccagtccaagtatgagccccggagccacatgatggacgtccagggctccacccaggactcggccatcaaggacttcgtgctgaagtacgccctgcccctggttggccaccgcaaggtgtcaaacgatgctaagcgctacaccaggcgccccctggtggtcgtctactacagtgtggacttcagctttgattacagagctgcaactcagttttggcggagcaaagtcctagaggtggccaaggacttccctgagtacacctttgccattgcggacgaagaggactatgctggggaggtgaaggacctggggctcagcgagagtggggaggatgtcaatgccgccatcctggacgagagtgggaagaagttcgccatggagccagaggagtttgactctgacaccctccgcgagtttgtcactgctttcaaaaaaggaaaactgaagccagtcatcaaatcccagccagtgcccaagaacaacaagggacccgtcaaggtcgtggtgggaaagacctttgactccattgtgatggaccccaagaaggacgtcctcatcgagttctacgcgccatggtgcgggcactgcaagcagctagagcccgtgtacaacagcctggccaagaagtacaagggccaaaagggcctggtcatcgccaagatggacgccactgccaacgacgtccccagcgaccgctataaggtggagggcttccccaccatctacttcgcccccagtggggacaaaaagaacccagttaaatttgagggtggagacagagatctggagcatttgagcaagtttatagaagaacatgccacaaaactgagcaggaccaaggaagagctttgaaggcctgaggtctgcggaaggtgggaggaggcagacgccctgcgtggcccatggtcggggcgtccaccggaggccggcaacaaacgacagtatctcggattcctttttttttttttttaattttttatactttgttgtttcacttcatgctctgaatactgaataaccatgaatgactgaatagtttagtccagatttttacagaggatacatctatttttatcattatttggggtttgaaaaatttttttttacaccttctaatttctttatttctcaaagcagataattcttctgtgtgaaaatgttttctttttttaatttaaggtttaaaattccttttccaaatcatgttgattttgctctttaaaaaaaaaaaaaaaaaaaaaaaaaaaaaaaaaaaaagaagggctgggaccaaccgggtgagatccacaagtctctggatgtggctgaaggcaaatacacaattgaagtactttctgttttgaagtgctttcccttttgaatctggtttgaaacatgcagcttctgtctctagcccaaggaaagaccaaaacatagggaaataaaagcatttatctttgtcttggaagtaattgttgaagttgtgcagttgatcagtgcacagttagctgcaatgtttatagaaattgattgttaaaccaaatttacactggcatgtgtggtgtagtttctaaaaggcacttcacatttgaaatttttcttaccttagaaagtttctagtgatctaaatgtctagttttgtattcttttgtgtgtgttcactgtttctcagtattaccacttgaataattctctgtacaggggggtttgtgctatacactgggatgtctaattgcagcaataaagcctttctt

SEQ ID NO: 137 - DNA, 2334 bp, Homo sapiens
agacacctctgccctcaccatgagcctctggcagcccctggtcctggtgctcctggtgctgggctgctgctttgctgcccccagacagcgccagtccacccttgtgctcttccctggagacctgagaaccaatctcaccgacaggcagctggcagaggaatacctgtaccgctatggttacactcgggtggcagagatgcgtggagagtcgaaatctctggggcctgcgctgctgcttctccagaagcaactgtccctgcccgagaccggtgagctggatagcgccacgctgaaggccatgcgaaccccacggtgcggggtcccagacctgggcagattccaaacctttgagggcgacctcaagtggcaccaccacaacatcacctattggatccaaaactactcggaagacttgccgcgggcggtgattgacgacgcctttgcccgcgccttcgcactgtggagcgcggtgacgccgctcaccttcactcgcgtgtacagccgggacgcagacatcgtcatccagtttggtgtcgcggagcacggagacgggtatcccttcgacgggaaggacgggctcctggcacacgcctttcctcctggccccggcattcagggagacgcccatttcgacgatgacgagttgtggtccctgggcaagggcgtcgtggttccaactcggtttggaaacgcagatggcgcggcctgccacttccccttcatcttcgagggccgctcctactctgcctgcaccaccgacggtcgctccgacggcttgccctggtgcagtaccacggccaactacgacaccgacgaccggtttggcttctgccccagcgagagactctacacccgggacggcaatgctgatgggaaaccctgccagtttccattcatcttccaaggccaatcctactccgcctgcaccacggacggtcgctccgacggctaccgctggtgcgccaccaccgccaactacgaccgggacaagctcttcggcttctgcccgacccgagctgactcgacggtgatggggggcaactcggcgggggagctgtgcgtcttccccttcactttcctgggtaaggagtactcgacctgtaccagcgagggccgcggagatgggcgcctctggtgcgctaccacctcgaactttgacagcgacaagaagtggggcttctgcccggaccaaggatacagtttgttcctcgtggcggcgcatgagttcggccacgcgctgggcttagatcattcctcagtgccggaggcgctcatgtaccctatgtaccgcttcactgaggggccccccttgcataaggacgacgtgaatggcatccggcacctctatggtcctcgccctgaacctgagccacggcctccaaccaccaccacaccgcagcccacggctcccccgacggtctgccccaccggaccccccactgtccacccctcagagcgccccacagctggccccacaggtcccccctcagctggccccacaggtccccccactgctggcccttctacggccactactgtgcctttgagtccggtggacgatgcctgcaacgtgaacatcttcgacgccatcgcggagattgggaaccagctgtatttgttcaaggatgggaagtactggcgattctctgagggcagggggagccggccgcagggccccttccttatcgccgacaagtggcccgcgctgccccgcaagctggactcggtctttgaggagccgctctccaagaagcttttcttcttctctgggcgccaggtgtgggtgtacacaggcgcgtcggtgctgggcccgaggcgtctggacaagctgggcctgggagccgacgtggcccaggtgaccggggccctccggagtggcagggggaagatgctgctgttcagcgggcggcgcctctggaggttcgacgtgaaggcgcagatggtggatccccggagcgccagcgaggtggaccggatgttccccggggtgcctttggacacgcacgacgtcttccagtaccgagagaaagcctatttctgccaggaccgcttctactggcgcgtgagttcccggagtgagttgaaccaggtggaccaagtgggctacgtgacctatgacatcctgcagtgccctgaggactagggctcccgtcctgctttgcagtgccatgtaaatccccactgggaccaaccctggggaaggagccagtttgccggatacaaactggtattctgttctggaggaaagggaggagtggaggtgggctgggccctctcttctcacctttgttttttgttggagtgtttctaataaacttggattctctaaccttt

SEQ ID NO: 138 - DNA, 10096 bp, Homo sapiens
ggagaagcgggcgaattgggcaccggtggcggctgcgggcagtttgaattagactctgggctccagcccgccgaagccgcgccagaactgtactctccgagaggtcgttttcccgtccccgagagcaagtttatttacaaatgttggagtaataaagaaggcagaacaaaatgagctgggctttggaagaatggaaagaagggctgcctacaagaactcttcagaaaattcaagagcttgaaggacagcttgacaaactgaagaaggaaaagcagcaaaggcagtttcagcttgacagtctcgaggctgcgccgcagaagcaaacacagaaggttgaaaatgaaaaaaccgagggtacaaacctgaaaagggagaatcaaagattgatggaaatatgtgaaagtctggagaaaactaagcagaagatttctcatgaacttcaagtcaaggagtcacaagtgaatttccaggaaggacaactgaattcaggcaaaaaacaaatagaaaaactggaacaggaacttaaaaggtgtaaatctgagcttgaaagaagccaacaagctgcgcagtctgcagatgtctctctgaatccatgcaatacaccacaaaaaatttttacaactccactaacaccaagtcaatattatagtggttccaagtatgaagatctaaaagaaaaatataataaagaggttgaagaacgaaaaagattagaggcagaggttaaagccttgcaggctaaaaaagcaagccagactcttccacaagccaccatgaatcaccgcgacattgcccggcatcaggcttcatcatctgtgttctcatggcagcaagagaagaccccaagtcatctttcatctaattctcaaagaactccaattaggagagatttctctgcatcttacttttctggggaactagaggtgactccaagtcgatcaactttgcaaatagggaaaagagatgctaatagcagtttctttggcaattctagcagtcctcatcttttggatcaattaaaagcgcagaatcaagagctaagaaacaagattaatgagttggaactacgcctgcaaggacatgaaaaagaaatgaaaggccaagtgaataagtttcaagaactccaactccaactggagaaagcaaaagtggaattaattgaaaaagagaaagttttgaacaaatgtagggatgaactagtgagaacaacagcacaatacgaccaggcgtcaaccaagtatactgcattggaacaaaaactgaaaaaattgacggaagatttgagttgtcagcgacaaaatgcagaaagtgccagatgttctctggaacagaaaattaaggaaaaagaaaaggagtttcaagaggagctctcccgtcaacagcgttctttccaaacactggaccaggagtgcatccagatgaaggccagactcacccaggagttacagcaagccaagaatatgcacaacgtcctgcaggctgaactggataaactcacatcagtaaagcaacagctagaaaacaatttggaagagtttaagcaaaagttgtgcagagctgaacaggcgttccaggcgagtcagatcaaggagaatgagctgaggagaagcatggaggaaatgaagaaggaaaacaacctccttaagagtcactctgagcaaaaggccagagaagtctgccacctggaggcagaactcaagaacatcaaacagtgtttaaatcagagccagaattttgcagaagaaatgaaagcgaagaatacctctcaggaaaccatgttaagagatcttcaagaaaaaataaatcagcaagaaaactccttgactttagaaaaactgaagcttgctgtggctgatctggaaaagcagcgagattgttctcaagaccttttgaagaaaagagaacatcacattgaacaacttaatgataagttaagcaagacagagaaagagtccaaagccttgctgagtgctttagagttaaaaaagaaagaatatgaagaattgaaagaagagaaaactctgttttcttgttggaaaagtgaaaacgaaaaacttttaactcagatggaatcagaaaaggaaaacttgcagagtaaaattaatcacttggaaacttgtctgaagacacagcaaataaaaagtcatgaatacaacgagagagtaagaacgctggagatggacagagaaaacctaagtgtcgagatcagaaaccttcacaacgtgttagacagtaagtcagtggaggtagagacccagaaactagcttatatggagctacagcagaaagctgagttctcagatcagaaacatcagaaggaaatagaaaatatgtgtttgaagacttctcagcttactgggcaagttgaagatctagaacacaagcttcagttactgtcaaatgaaataatggacaaagaccggtgttaccaagacttgcatgccgaatatgagagcctcagggatctgctaaaatccaaagatgcttctctggtgacaaatgaagatcatcagagaagtcttttggcttttgatcagcagcctgccatgcatcattcctttgcaaatataattggagaacaaggaagcatgccttcagagaggagtgaatgtcgtttagaagcagaccaaagtccgaaaaattctgccatcctacaaaatagagttgattcacttgaattttcattagagtctcaaaaacagatgaactcagacctgcaaaagcagtgtgaagagttggtgcaaatcaaaggagaaatagaagaaaatctcatgaaagcagaacagatgcatcaaagttttgtggctgaaacaagtcagcgcattagtaagttacaggaagacacttctgctcaccagaatgttgttgctgaaaccttaagtgcccttgagaacaaggaaaaagagctgcaacttttaaatgataaggtagaaactgagcaggcagagattcaagaattaaaaaagagcaaccatctacttgaagactctctaaaggagctacaacttttatccgaaaccctaagcttggagaagaaagaaatgagttccatcatttctttaaataaaagggaaattgaagagctgacccaagagaatgggactcttaaggaaattaatgcatccttaaatcaagagaagatgaacttaatccagaaaagtgagagttttgcaaactatatagatgaaagggagaaaagcatttcagagttatctgatcagtacaagcaagaaaaacttattttactacaaagatgtgaagaaaccggaaatgcatatgaggatcttagtcaaaaatacaaagcagcacaggaaaagaattctaaattagaatgcttgctaaatgaatgcactagtctttgtgaaaataggaaaaatgagttggaacagctaaaggaagcatttgcaaaggaacaccaagaattcttaacaaaattagcatttgctgaagaaagaaatcagaatctgatgctagagttggagacagtgcagcaagctctgagatctgagatgacagataaccaaaacaattctaagagcgaggctggtggtttaaagcaagaaatcatgactttaaaggaagaacaaaacaaaatgcaaaaggaagttaatgacttattacaagagaatgaacagctgatgaaggtaatgaagactaaacatgaatgtcaaaatctagaatcagaaccaattaggaactctgtgaaagaaagagagagtgagagaaatcaatgtaattttaaacctcagatggatcttgaagttaaagaaatttctctagatagttataatgcgcagttggtgcaattagaagctatgctaagaaataaggaattaaaacttcaggaaagtgagaaggagaaggagtgcctgcagcatgaattacagacaattagaggagatcttgaaaccagcaatttgcaagacatgcagtcacaagaaattagtggccttaaagactgtgaaatagatgcggaagaaaagtatatttcagggcctcatgagttgtcaacaagtcaaaacgacaatgcacaccttcagtgctctctgcaaacaacaatgaacaagctgaatgagctagagaaaatatgtgaaatactgcaggctgaaaagtatgaactcgtaactgagctgaatgattcaaggtcagaatgtatcacagcaactaggaaaatggcagaagaggtagggaaactactaaatgaagttaaaatattaaatgatgacagtggtcttctccatggtgagttagtggaagacataccaggaggtgaatttggtgaacaaccaaatgaacagcaccctgtgtctttggctccattggacgagagtaattcctacgagcacttgacattgtcagacaaagaagttcaaatgcactttgccgaattgcaagagaaattcttatctttacaaagtgaacacaaaattttacatgatcagcactgtcagatgagctctaaaatgtcagagctgcagacctatgttgactcattaaaggccgaaaatttggtcttgtcaacgaatctgagaaactttcaaggtgacttggtgaaggagatgcagctgggcttggaggaggggctcgttccatccctgtcatcctcttgtgtgcctgacagctctagtcttagcagtttgggagactcctccttttacagagctcttttagaacagacaggagatatgtctcttttgagtaatttagaaggggctgtttcagcaaaccagtgcagtgtagatgaagtattttgcagcagtctgcagacctatgttgactcattaaaggccgaaaatttggtcttgtcaacgaatctgagaaactttcaaggtgacttggtgaaggagatgcagctgggcttggaggaggggctcgttccatccctgtcatcctcttgtgtgcctgacagctctagtcttagcagtttgggagactcctccttttacagagctcttttagaacagacaggagatatgtctcttttgagtaatttagaaggggttgtttcagcaaaccagtgcagtgtagatgaagtattttgcagcagtctgcaggaggagaatctgaccaggaaagaaaccccttcggccccagcgaagggtgttgaagagcttgagtccctctgtgaggtgtaccggcagtccctcgagaagctagaagagaaaatggaaagtcaagggattatgaaaaataaggaaattcaagagctcgagcagttattaagttctgaaaggcaagagcttgactgccttaggaagcagtatttgtcagaaaatgaacagtggcaacagaagctgacaagcgtgactctggagatggagtccaagttggcggcagaaaagaaacagacggaacaactgtcacttgagctggaagtagcacgactccagctacaaggtctggacttaagttctcggtctttgcttggcatcgacacagaagatgctattcaaggccgaaatgagagctgtgacatatcaaaagaacatacttcagaaactacagaaagaacaccaaagcatgatgttcatcagatttgtgataaagatgctcagcaggacctcaatctagacattgagaaaataactgagactggtgcagtgaaacccacaggagagtgctctggggaacagtccccagataccaattatgagcctccaggggaagataaaacccagggctcttcagaatgcatttctgaattgtcattttctggtcctaatgctttggtacctatggatttcctggggaatcaggaagatatccataatcttcaactgcgggtaaaagagacatcaaatgagaatttgagattacttcatgtgatagaggaccgtgacagaaaagttgaaagtttgctaaatgaaatgaaagaattagactcaaaactccatttacaggaggtacaactaatgaccaaaattgaagcatgcatagaattggaaaaaatagttggggaacttaagaaagaaaactcagatttaagtgaaaaattggaatatttttcttgtgatcaccaggagttactccagagagtagaaacttctgaaggcctcaattctgatttagaaatgcatgcagataaatcatcacgtgaagatattggagataatgtggccaaggtgaatgacagctggaaggagagatttcttgatgtggaaaatgagctgagtaggatcagatcggagaaagctagcattgagcatgaagccctctacctggaggctgacttagaggtagttcaaacagagaagctatgtttagaaaaagacaatgaaaataagcagaaggttattgtctgccttgaagaagaactctcagtggtcacaagtgagagaaaccagcttcgtggagaattagatactatgtcaaaaaaaaccacggcactggatcagttgtctgaaaaaatgaaggagaaaacacaagagcttgagtctcatcaaagtgagtgtctccattgcattcaggtggcagaggcagaggtgaaggaaaagacggaactccttcagactttgtcctctgatgtgagtgagctgttaaaagacaaaactcatctccaggaaaagctgcagagtttggaaaaggactcacaggcactgtctttgacaaaatgtgagctggaaaaccaaattgcacaactgaataaagagaaagaattgcttgtcaaggaatctgaaagcctgcaggccagactgagtgaatcagattatgaaaagctgaatgtctccaaggccttggaggccgcactggtggagaaaggtgagttcgcattgaggctgagctcaacacaggaggaagtgcatcagctgagaagaggcatcgagaaactgagagttcgcattgaggccgatgaaaagaagcagctgcacatcgcagagaaactgaaagaacgcgagcgggagaatgattcacttaaggataaagttgagaaccttgaaagggaattgcagatgtcagaagaaaaccaggagctagtgattcttgatgccgagaattccaaagcagaagtagagactctaaaaacacaaatagaagagatggccagaagcctgaaagtttttgaattagaccttgtcacgttaaggtctgaaaaagaaaatctgacaaaacaaatacaagaaaaacaaggtcagttgtcagaactagacaagttactctcttcatttaaaagtctgttagaagaaaaggagcaagcagagatacagatcaaagaagaatctaaaactgcagtggagatgcttcagaatcagttaaaggagctaaatgaggcagtagcagccttgtgtggtgaccaagaaattatgaaggccacagaacagagtctagacccaccaatagaggaagagcatcagctgagaaatagcattgaaaagctgagagcccgcctagaagctgatgaaaagaagcagctctgtgtcttacaacaactgaaggaaagtgagcatcatgcagatttacttaagggtagagtggagaaccttgaaagagagctagagatagccaggacaaaccaagagcatgcagctcttgaggcagagaattccaaaggagaggtagagaccctaaaagcaaaaatagaagggatgacccaaagtctgagaggtctggaattagatgttgttactataaggtcagaaaaagaagatctgacaaatgaattacaaaaagagcaagagcgaatatctgaattagaaataataaattcatcatttgaaaatattttgcaagaaaaagagcaagagaaagtacagatgaaagaaaaatcaagcactgccatggagatgcttcaaacacaattaaaagagctcaatgagagagtggcagccctgcataatgaccaagaagcctgtaaggccaaagagcagaatcttagtagtcaagtagagtgtcttgaacttgagaaggctcagttgctacaaggccttgatgaggccaaaaataattatattgttttgcaatcttcagtgaatggcctcattcaagaagtagaagatggcaagcagaaactggagaagaaggatgaagaaatcagtagactgaaaaatcaaattcaagaccaagagcagcttgtctctaaactgtcccaggtggaaggagagcaccaactttggaaggagcaaaacttagaactgagaaatctgacagtggaattggagcagaagatccaagtgctacaatccaaaaatgcctctttgcaggacacattagaagtgctgcagagttcttacaagaatctagagaatgagcttgaattgacaaaaatggacaaaatgtcctttgttgaaaaagtaaacaaaatgactgcaaaggaaactgagctgcagagggaaatgcatgagatggcacagaaaacagcagagctgcaagaagaactcagtggagagaaaaataggctagctggagagttgcagttactgttggaagaaataaagagcagcaaagatcaattgaaggagctcacactagaaaatagtgaattgaagaagagcctagattgcatgcacaaagaccaggtggaaaaggaagggaaagtgagagaggaaatagctgaatatcagctacggcttcatgaagctgaaaagaaacaccaggctttgcttttggacacaaacaaacagtatgaagtagaaatccagacataccgagagaaattgacttctaaagaagaatgtctcagttcacagaagctggagatagaccttttaaagtctagtaaagaagagctcaataattcattgaaagctactactcagattttggaagaattgaagaaaaccaagatggacaatctaaaatatgtaaatcagttgaagaaggaaaatgaacgtgcccaggggaaaatgaagttgttgatcaaatcctgtaaacagctggaagaggaaaaggagatactgcagaaagaactctctcaacttcaagctgcacaggagaagcagaaaacaggtactgttatggataccaaggtcgatgaattaacaactgagatcaaagaactgaaagaaactcttgaagaaaaaaccaaggaggcagatgaatacttggataagtactgttccttgcttataagccatgaaaagttagagaaagctaaagagatgttagagacacaagtggcccatctgtgttcacagcaatctaaacaagattcccgagggtctcctttgctaggtccagttgttccaggaccatctccaatcccttctgttactgaaaagaggttatcatctggccaaaataaagcttcaggcaagaggcaaagatccagtggaatatgggagaatggtggaggaccaacacctgctaccccagagagcttttctaaaaaaagcaagaaagcagtcatgagtggtattcaccctgcagaagacacggaaggtactgagtttgagccagagggacttccagaagttgtaaagaaagggtttgctgacatcccgacaggaaagactagcccatatatcctgcgaagaacaaccatggcaactcggaccagcccccgcctggctgcacagaagttagcgctatccccactgagtctcggcaaagaaaatcttgcagagtcctccaaaccaacagctggtggcagcagatcacaaaaggtcaaagttgctcagcggagcccagtagattcaggcaccatcctccgagaacccaccacgaaatccgtcccagtcaataatcttcctgagagaagtccgactgacagccccagagagggcctgagggtcaagcgaggccgacttgtccccagccccaaagctggactggagtccaagggcagtgagaactgtaaggtccagtgaaggcactttgtgtgtcagtacccctgggaggtgccagtcattgaatagataaggctgtgcctacaggacttctctttagtcagggcatgctttattagtgaggagaaaacaattccttagaagtcttaaatatattgtactctttagatctcccatgtgtaggtattgaaaaagtttggaagcactgatcacctgttagcattgccattcctctactgcaatgtaaatagtataaagctatgtatataaagctttttggtaatatgttacaattaaaatgacaagcactatat

SEQ ID NO: 139 - DNA, 1633 bp, Homo sapiens
cgtggaggcagctagcgcgaggctggggagcgctgagccgcgcgtcgtgccctgcgctgcccagactagcgaacaatacagtcgggatggctaaaggtgaccccaagaaaccaaagggcaagacgtccgcttatgccttctttgtgcagacatgcagagaagaacataagaagaaaaacccagaggtccctgtcaattttgcggaattttccaagaagtgctctgagaggtggaagacggtgtccgggaaagagaaatccaaatttgatgaaatggcaaaggcagataaagtgcgctatgatcgggaaatgaaggattatggaccagctaagggaggcaagaagaagaaggatcctaatgctcccaaaaggccaccgtctggattcttcctgttctgttcagaattccgccccaagatcaaatccacaaaccccggcatctctattggagacgtggcaaaaaagctgggtgagatgtggaataatttaaatgacagtgaaaagcagccttacatcactaaggcggcaaagctgaaggagaagtatgagaaggatgttgctgactataagtcgaaaggaaagtttgatggtgcaaagggtcctgctaaagttgcccggaaaaaggtggaagaggaagatgaagaacaggaggaggaagaagaggaggaggaggaggaggaggatgaataaagaaactgtttatctgtctccttgtgaatacttagagtaggggagcgccgtaattgacacatctcttatttgagaagtgtctgttgccctcattaggtttaattacaaaatttgatcacgatcatattgtagtctctcaaagtgctctagaaattgtcagtggtttacatgaagtggccatgggtgtctggagcaccctgaaactgtatcaaagttgtacatatttccaaacatttttaaaatgaaaaggcactctcgtgttctcctcactctgtgcactttgctgttggtgtgacaaggcatttaaagatgtttctggcattttctttttatttgtaaggtggtggtaactatggttattggctagaaatcctgagttttcaactgtatatatctatagtttgtaaaaagaacaaaacaaccgagacaaacccttgatgctccttgctcggcgttgaggctgtggggaagatgccttttgggagaggctgtagctcagggcgtgcactgtgaggctggacctgttgactctgcagggggcatccatttagcttcaggttgtcttgtttctgtatatagtgacatagcattctgctgccatcttagctgtggacaaaggggggtcagctggcatgagaatatttttttttaagtgcggtagtttttaaactgtttgtttttaaacaaactatagaactcttcattgtcagcaaagcaaagagtcactgcatcaatgaaagttcaagaacctcctgtacttaaacacgattcgcaacgttctgttattttttttgtatgtttagaatgctgaaatgtttttgaagttaaataaacagtattacatttttagaactcttctctactataacagtcaatttctgactcacagcagtgaacaaacccccactccgttgtatttggagactggcctccctataaatgtg

SEQ ID NO: 140 - DNA, 4086 bp, Homo sapiens
tttttatttttttcgagtgaaggacccggagccgaaacaccggtagagcggggaggtgggtactacacaaccgtctccagccttggtctgagtggactgtcctgcagcgaccatgccccgtaaaggcacccagccctccactgcccggcgcagagaggaagggccgccgccgccgtcccctgacggcgccagcagcgacgcggagcctgagccgccgtccggccgcacggagagcccagccaccgccgcagagactgcaagtgaggaacttgataatagaagtttagaagagattttgaacagcattcctcctcccccgcctccagcaatgaccaatgaagctggagctcctcggcttatgataactcatattgtaaaccagaacttcaaatcctatgctggggagaaaattctgggacctttccataagcgcttttcctgtattatcgggccaaatggcagtggcaaatccaatgttattgattctatgctttttgtgtttggctatcgagcacaaaaaataagatctaaaaaactctcagtattaatacataattctgatgaacacaaggacattcagagttgtacagtagaagttcattttcaaaagataattgataaggaaggggatgattatgaagtcattcctaacagtaatttctatgtatccagaacggcctgcagagataatacttctgtctatcacataagtggaaagaaaaagacatttaaggatgttggaaatcttcttcgaagccatggaattgacttggaccataatagatttttaattttacagggtgaagttgaacaaattgctatgatgaaaccaaaaggccagactgaacacgatgagggtatgcttgaatatttagaagatataattggttgtggacggctaaatgaacctattaaagtcttgtgtcggagagttgaaatattaaatgaacacagaggagagaagttaaacagggtaaagatggtggaaaaggaaaaggatgccttagaaggagagaaaaacatagctatcgaatttcttaccttggaaaatgaaatatttagaaaaaagaatcatgtttgtcaatattatatttatgagttgcagaaacgaattgctgaaatggaaactcaaaaggaaaaaattcatgaagataccaaagaaattaatgagaagagcaatatactatcaaatgaaatgaaagctaagaataaagatgtaaaagatacagaaaagaaactgaataaaattacaaaatttattgaggagaataaagaaaaatttacacagctagatttggaagatgttcaagttagagaaaagttaaaacatgccacgagtaaagccaaaaaactggagaaacaacttcaaaaagataaagaaaaggttgaagaatttaaaagtatacctgccaagagtaacaatatcattaatgaaacaacaaccagaaacaatgccctcgagaaggaaaaagagaaagaagaaaaaaaattaaaggaagttatggatagccttaaacaggaaacacaagggcttcagaaagaaaaagaaagtcgagagaaagaacttatgggtttcagcaaatcggtaaatgaagcacgttcaaagatggatgtagcccagtcagaacttgatatctatctcagtcgtcataatactgcagtgtctcaattaactaaggctaaggaagctctaattgcagcttctgagactctcaaagaaaggaaagctgcaatcagagatatagaaggaaaactccctcaaactgaacaagaattaaaggagaaagaaaaagaacttcaaaaacttacacaagaagaaacaaactttaaaagtttggttcatgatctctttcaaaaagttgaagaagcaaagagctcattagcaatgaatcgaagtagggggaaagtccttgatgcaataattcaagaaaaaaaatctggcaggattccaggaatatatggaagattgggggacttaggagccattgatgaaaaatacgacgtggctatatcatcctgttgtcatgcactggactacattgttgttgattctattgatatagcccaagaatgtgtaaacttccttaaaagacaaaatattggagttgcaacctttataggtttagataagatggctgtatgggcgaaaaagatgaccgaaattcaaactcctgaaaatactcctcgtttatttgatttagtaaaagtaaaagatgagaaaattcgccaagctttttattttgctttacgagataccttagtagctgacaacttggatcaagccacaagagtagcatatcaaaaagatagaagatggagagtggtaactttacagggacaaatcatagaacagtcaggtacaatgactggtggtggaagcaaagtaatgaaaggaagaatgggttcctcacttgttattgaaatctctgaagaagaggtaaacaaaatggaatcacagttgcaaaacgactctaaaaaagcaatgcaaatccaagaacagaaagtacaacttgaagaaagagtagttaagttacggcatagtgaacgagaaatgaggaacacactagaaaaatttactgcaagcatccagcgtttaatagagcaagaagaatatttgaatgtccaagttaaggaacttgaagctaatgtacttgctacagcccctgacaaaaaaaagcagaaattgctagaagaaaacgttagtgctttcaaaacagaatatgatgctgtggctgagaaagctggtaaagtagaagctgaggttaaacgcttacacaataccatcgtagaaatcaataatcataaactcaaggcccaacaagacaaacttgataaaataaataagcaattagatgaatgtgcttctgctattactaaagcccaagtagcaatcaagactgctgacagaaaccttcaaaaggcacaagactctgtcttgcgtacagagaaagaaataaaagatactgagaaagaggtggatgacctaacagcagagctgaaaagtcttgaggacaaagcagcagaggtcgtaaagaatacaaatgctgcagaggaatccttaccagagatccagaaagaacatcgcaatctgcttcaagaattaaaagttattcaagaaaatgaacatgctcttcaaaaagatgcacttagtattaagttgaaacttgaacaaatagatggtcacattgctgaacataattctaaaataaaatattggcacaaagagatttcaaaaatatcactgcatcctatagaagataatcctattgaagagatttcggttctaagcccagaggatcttgaagcgatcaagaatccagattctataacaaatcaaattgcacttttggaagcccggtgtcatgaaatgaaaccaaacctcggtgccatcgcagagtataaaaagaaggaagaattgtatttgcaacgggtagcagaattggacaaaattacttatgaaagagacagttttagacaggcatatgaagatcttcggaaacaaaggcttaatgaatttatggcaggtttttatataataacaaataaattaaaggaaaattaccaaatgcttactttgggaggggacgccgaactcgagcttgtagacagcttggatcctttctctgaaggaatcatgttcagtgttcgaccacctaagaaaagttggaaaaagatcttcaacctttcgggaggagagaaaacacttagttcattggctttagtatttgctcttcaccactacaagcccactcccctttacttcatggatgagattgatgcagcccttgattttaaaaatgtgtccattgttgcattttatatatatgaacaaacaaaaaatgcacagttcataataatttctcttcgaaataatatgtttgagatttcggatagacttattggaatttacaagacatacaacataacaaaaagtgttgctgtaaatccaaaagaaattgcatctaagggactttgttgaactttatgctgaagattcttcaagttgattcagtgtattactgatttttttctatttgtaaaggattatgagttgtataaaatacatactccctaaactagatcatg

SEQ ID NO: 141 - DNA, 1436 bp, Homo sapiens
agtgtggtcaggcggctcggactgagcaggactttccttatcccagttgattgtgcagaatacactgcctatcgcttgtcttctattcaccatggcttcttctgatatccaggtgaaagaactggagaagcgtgcctcaggccaggcttttgagctgattctcagccctcggtcaaaagaatctgttccagaattccccctttcccctccaaagaagaaggatctttccctggaggaaattcagaagaaattagaagctgcagaagaaagacgcaagtcccatgaagctgaggtcttgaagcagctggctgagaaacgagagcacgagaaagaagtgcttcagaaggcaatagaagagaacaacaacttcagtaaaatggcagaagagaaactgacccacaaaatggaagctaataaagagaaccgagaggcacaaatggctgccaaactggaacgtttgcgagagaaggataagcacattgaagaagtgcggaagaacaaagaatccaaagaccctgctgacgagactgaagctgactaatttgttctgagaactgactttctccccatccccttcctaaatatccaaagactgtactggccagtgtcattttattttttccctcctgacaaatattttagaagctaatgtaggactgtataggtagatccagatccagactgtaagatgttgttttaggggctaaaggggagaaactgaaagtgttttactctttttctaaagtgttggtctttctaatgtagctatttttcttgttgcatcttttctacttcagtacacttggtgtactgggttaatggctagtactgtattggctctgtgaaaacatatttgtgaaaagagtatgtagtggcttcttttgaactgttagatgctgaatatctgttcacttttcaatcccaattctgtcccaatcttaccagatgctactggacttgaatggttaataaaactgcacagtgctgttggtggcagtgacttcttttgagttaggttaataaatcaagccatagagcccctcctggttgatacttgttccagatggggcctttggggctggtagaaatacccaacgcacaaatgaccgcacgttctctgccccgtttcttgccccagtgtggtttgcattgtctccttccacaatgactgctttgtttggatgcctcagcccaggtcagctgttactttctttcagatgtttatttgcaaacaaccattttttgttctgtgtcccttttaaaaggcagattaaaagcacaagcgtgtttctagagaacagttgagagagaatctcaagattctacttggtggtttgcttgctctacgttacaggtggggcatgtcctcatcctttcctgccataaaagctatgacacgagaatcagaatattaataaaactttatgtactgctgt

SEQ ID NO: 142 - DNA, 2917 bp, Homo sapiens
ggaaaaaagcgacttgtggcggtcgagcgtggcgcaggcgaatcctcggcactaagcaaatatggacctcgcggcggcagcggagccgggcgccggcagccagcacctggaggtccgcgacgaggtggccgagaagtgccagaaactgttcctggacttcttggaggagtttcagagcagcgatggagaaattaaatacttgcaattagcagaggaactgattcgtcctgagagaaacacattggttgtgagttttgtggacctggaacaatttaaccagcaactttccaccaccattcaagaggagttctatagagtttacccttacctgtgtcgggccttgaaaacattcgtcaaagaccgtaaagagatccctcttgccaaggatttttatgttgcattccaagacctgcctaccagacacaagattcgagagctcacctcatccagaattggtttgctcactcgcatcagtgggcaggtggtgcggactcacccagttcacccagagcttgtgagcggaacttttctgtgcttggactgtcagacagtgatcagggatgtagaacagcagttcaaatacacacagccaaacatctgccgaaatccagtttgtgccaacaggaggagattcttactggatacaaataaatcaagatttgttgattttcaaaaggttcgtattcaagagacccaagctgagcttcctcgagggagtatcccccgcagtttagaagtaattttaagggctgaagctgtggaatcagctcaagctggtgacaagtgtgactttacagggacactgattgttgtgcctgacgtctccaagcttagcacaccaggagcacgtgcagaaactaattcccgtgtcagtggtgttgatggatatgagacagaaggcattcgaggactccgggcccttggtgttagggacctttcttataggctggtctttcttgcctgctgtgttgcgccaaccaacccaaggtttggggggaaagagctcagagatgaggaacagacagctgagagcattaagaaccaaatgactgtgaaagaatgggagaaagtgtttgagatgagtcaagataaaaatctataccacaatctttgtaccagcctgttccctactatacatggcaatgatgaagtaaaacggggtgtcctgctgatgctctttggtggcgttccaaagacaacaggagaagggacctctcttcgaggggacataaatgtttgcattgttggtgacccaagtacagctaagagccaatttctcaagcacgtggaggagttcagccccagagctgtctacaccagtggtaaagcgtccagtgctgctggcttaacagcagctgttgtgagagatgaagaatctcatgagtttgtcattgaggctggagctttgatgttggctgataatggtgtgtgttgtattgatgaatttgataagatggacgtgcgggatcaagttgctattcatgaagctatggaacagcagaccatatccatcactaaagcaggagtgaaggctactctgaacgcccggacgtccattttggcagcagcaaacccaatcagtggacactatgacagatcaaaatcattgaaacagaatataaatttgtcagctcccatcatgtcccgattcgatctcttctttatccttgtggatgaatgtaatgaggttacagattatgccattgccaggcgcatagtagatttgcattcaagaattgaggaatcaattgatcgtgtctattccctcgatgatatcagaagatatcttctctttgcaagacagtttaaacccaagatttccaaagagtcagaggacttcattgtggagcaatataaacatctccgccagagagatggttctggagtgaccaagtcttcatggaggattacagtgcgacagcttgagagcatgattcgtctctctgaagctatggctcggatgcactgctgtgatgaggtccaacctaaacatgtgaaggaagctttccggttactgaataaatcaatcatccgtgtggaaacacctgatgtcaatctagatcaagaggaagagatccagatggaggtagatgagggtgctggtggcatcaatggtcatgctgacagccctgctcctgtgaacgggatcaatggctacaatgaagacataaatcaagagtctgctcccaaagcctccttaaggctgggcttctctgagtactgccgaatctctaaccttattgtgcttcacctcagaaaggtggaagaagaagaggacgagtcagcattaaagaggagcgagcttgttaactggtacttgaaggaaatcgaatcagagatagactctgaagaagaacttataaataaaaaaagaatcatagagaaagttattcatcgactcacacactatgatcatgttctaattgagctcacccaggctggattgaaaggctccacagagggaagtgagagctatgaagaagatccctacttggtagttaaccctaactacttgctcgaagattgagatagtgaaagtaactgaccagagctgaggaactgtggcacagcacctcgtggcctggagcctggctggagctctgctagggacagaagtgtttctggaagtgatgcttccaggatttgttttcagaaacaagaattgagttgatggtcctatgtgtcacattcatcacaggtttcataccaacacaggcttcagcacttcctttggtgtgtttcctgtcccagtgaagttggaaccaaataatgtgtagtctctataaccaatacctttgttttcatgtgtaagaaaaggcccattacttttaaggtatgtgctgtcctattgagcaaataactttttttcaattgccagctactgcttttattcatcaaaataaaataacttgttctg

SEQ ID NO: 143 - DNA, 3020 bp, Homo sapiens
tgaagctcgtcagttcaccatccgccctcggcttccgcggggcgctgggccgccagcctcggcaccgtcctttcctttctccctcgcgttaggcaggtgacagcagggacatgtctcgggagatgcaggatgtagacctcgctgaggtgaagcctttggtggagaaaggggagaccatcaccggcctcctgcaagagtttgatgtccaggagcaggacatcgagactttacatggctctgttcacgtcacgctgtgtgggactcccaagggaaaccggcctgtcatcctcacctaccatgacatcggcatgaaccacaaaacctgctacaaccccctcttcaactacgaggacatgcaggagatcacccagcactttgccgtctgccacgtggacgcccctggccagcaggacggcgcagcctccttccccgcagggtacatgtacccctccatggatcagctggctgaaatgcttcctggagtccttcaacagtttgggctgaaaagcattattggcatgggaacaggagcaggcgcctacaccctaactcgatttgctctaaacaaccctgagatggtggagggccttgtccttatcaacgtgaacccttgtgcggaaggctggatggactgggccgcctccaagatctcaggatggacccaagctctgccggacatggtggtgtcccacctttttgggaaggaagaaatgcagagtaacgtggaagtggtccacacctaccgccagcacattgtgaatgacatgaaccccggcaacctgcacctgttcatcaatgcctacaacagccggcgcgacctggagattgagcgaccaatgccgggaacccacacagtcaccctgcagtgccctgctctgttggtggttggggacagctcgcctgcagtggatgccgtggtggagtgcaactcaaaattggacccaacaaagaccactctcctcaagatggcggactgtggcggcctcccgcagatctcccagccggccaagctcgctgaggccttcaagtacttcgtgcagggcatgggatacatgccctcggctagcatgacccgcctgatgcggtcccgcacagcctctggttccagcgtcacttctctggatggcacccgcagccgctcccacaccagcgagggcacccgaagccgctcccacaccagcgagggcacccgcagccgctcgcacaccagcgagggggcccacctggacatcacccccaactcgggtgctgctgggaacagcgccgggcccaagtccatggaggtctcctgctaggcggcctgcccagctgccgcccccggactctgatctctgtagtggccccctcctccccggccccttttcgccccctgcctgccatactgcgcctaactcggtattaatccaaagcttattttgtaagagtgagctctggtggagacaaatgaggtctattacgtgggtgccctctccaaaggcggggtggcggtggaccaaaggaaggaagcaagcatctccgcatcgcatcctcttccattaaccagtggccggttgccactctcctcccctccctcagagacaccaaactgccaaaaacaagacgcgtagcagcacacacttcacaaagccaagcctaggccgccctgagcatcctggttcaaacgggtgcctggtcagaaggccagccgcccacttcccgtttcctctttaactgaggagaagctgatccagctttccggaaacaaaatccttttcttcatttggggaggggggtaatagtgacatgcaggcacctcttttaaacaggcaaaacaggaagggggaaaaggtgggattcatgtcgaggctagaggcatttggaacaacaaatctacgtagttaacttgaagaaaccgatttttaaagttggtgcatctagaaagctttgaatgcagaagcaaacaagcttgatttttctagcatcctcttaatgtgcagcaaaagcaggcaacaaaatctcctggctttacagacaaaaatatttcagcaaacgttgggcatcatggtttttgaaggctttagttctgctttctgcctctcctccacagccccaacctcccacccctgatacatgagccagtgattattcttgttcagggagaagatcatttagatttgttttgcattccttagaatggagggcaacattccacagctgccctggctgtgatgagtgtccttgcaggggccggagtaggagcactggggtgggggcggaattggggttactcgatgtaagggattccttgttgttgtgttgagatccagtgcagttgtgatttctgtggatcccagcttggtccaggaattttgagagattggcttaaatccagttttcaatcttcgacagctgggctggaacgtgaactcagtagctgaacctgtctgacccggtcacgttcttggatcctcagaactctttgctcttgtcggggtgggggtgggaactcacgtggggagcggtggctgagaaaatgtaaggattctggaatacatattccatggactttccttccctctcctgcttcctcttttcctgctccctaacctttcgccgaatggggcagacaaacactgacgtttctgggtggccagtgcggctgccaggttcctgtactactgccttgtacttttcattttggctcaccgtggattttctcataggaagtttggtcagagtgaattgaatattgtaagtcagccactgggacccgaggatttctgggaccccgcagttgggaggaggaagtagtccagccttccaggtgggcgtgagaggcaatgactcgttacctgccgcccatcaccttggaggccttccctggccttgagtagaaaagtcggggatcggggcaagagaggctgagtacggatgggaaactattgtgcacaagtctttccagaggagtttcttaatgagatatttgtatttatttccagaccaataaatttgtaactttgcaaaaaaaaaaaaaaaaaaaa

SEQ ID NO: 144 - DNA, 2150 bp, Homo sapiens
ctcgagccacgaaggccccgctgtcctgtctagcagatacttgcacggtttacagaaattcggtccctgggtcgtgtcaggaaactggaaaaaaggtcataagcatgaagcgcagttcagtttccagcggtggtgctggccgcctctccatgcaggagttaagatcccaggatgtaaataaacaaggcctctatacccctcaaaccaaagagaaaccaacctttggaaagttgagtataaacaaaccgacatctgaaagaaaagtctcgctatttggcaaaagaactagtggacatggatcccggaatagtcaacttggtatattttccagttctgagaaaatcaaggacccgagaccacttaatgacaaagcattcattcagcagtgtattcgacaactctgtgagtttcttacagaaaatggttatgcacataatgtgtccatgaaatctctacaagctccctctgttaaagacttcctgaagatcttcacatttctttatggcttcctgtgcccctcatacgaacttcctgacacaaagtttgaagaagaggttccaagaatctttaaagaccttgggtatccttttgcactatccaaaagctccatgtacacagtgggggctcctcatacatggcctcacattgtggcagccttagtttggctaatagactgcatcaagatacatactgccatgaaagaaagctcacctttatttgatgatgggcagccttggggagaagaaactgaagatggaattatgcataataagttgtttttggactacaccataaaatgctatgagagttttatgagtggtgccgacagctttgatgagatgaatgcagagctgcagtcaaaactgaaggatttatttaatgtggatgcttttaagctggaatcattagaagcaaaaaacagagcattgaatgaacagattgcaagattggaacaagaaagagaaaaagaaccgaatcgtctagagtcgttgagaaaactgaaggcttccttacaaggagatgttcaaaagtatcaggcatacatgagcaatttggagtctcattcagccattcttgaccagaaattaaatggtctcaatgaggaaattgctagagtagaactagaatgtgaaacaataaaacaggagaacactcgactacagaatatcattgacaaccagaagtactcagttgcagacattgagcgaataaatcatgaaagaaatgaattgcagcagactattaataaattaaccaaggacctggaagctgaacaacagaagttgtggaatgaggagttaaaatatgccagaggcaaagaagcgattgaaacacaattagcagagtatcacaaattggctagaaaattaaaacttattcctaaaggtgctgagaattccaaaggttatgactttgaaattaagtttaatcccgaggctggtgccaactgccttgtcaaatacagggctcaagtttatgtacctcttaaggaactcctgaatgaaactgaagaagaaattaataaagccctaaataaaaaaatgggtttggaggatactttagaacaattgaatgcaatgataacagaaagcaagagaagtgtgagaactctgaaagaagaagttcaaaagctggatgatctttaccaacaaaaaattaaggaagcagaggaagaggatgaaaaatgtgccagtgagcttgagtccttggagaaacacaagcacctgctagaaagtactgttaaccaggggctcagtgaagctatgaatgaattagatgctgttcagcgggaataccaactagttgtgcaaaccacgactgaagaaagacgaaaagtgggaaataacttgcaacgtctgttagagatggttgctacacatgttgggtctgtagagaaacatcttgaggagcagattgctaaagttgatagagaatatgaagaatgcatgtcagaagatctctcggaaaatattaaagagattagagataagtatgagaagaaagctactctaattaagtcttctgaagaatgaagataaaatgttgatcatgtatatatatccatagtgaataaaattgtctcagtaaaaaaaaaaaaaaaaaaaaaaaaaaaaaaaaaaaaaaaaaaaaaaaaaaaaaaaaaaaaaaaa

SEQ ID NO: 145 - DNA, 2148 bp, Homo sapiens
gcttcagggtacagctcccccgcagccagaagccgggcctgcagcccctcagcaccgctccgggacaccccacccgcttcccaggcgtgacctgtcaacagcaacttcgcggtgtggtgaactctctgaggaaaaaccattttgattattactctcagacgtgcgtggcaacaagtgactgagacctagaaatccaagcgttggaggtcctgaggccagcctaagtcgcttcaaaatggaacgaaggcgtttgtggggttccattcagagccgatacatcagcatgagtgtgtggacaagcccacggagacttgtggagctggcagggcagagcctgctgaaggatgaggccctggccattgccgccctggagttgctgcccagggagctcttcccgccactcttcatggcagcctttgacgggagacacagccagaccctgaaggcaatggtgcaggcctggcccttcacctgcctccctctgggagtgctgatgaagggacaacatcttcacctggagaccttcaaagctgtgcttgatggacttgatgtgctccttgcccaggaggttcgccccaggaggtggaaacttcaagtgctggatttacggaagaactctcatcaggacttctggactgtatggtctggaaacagggccagtctgtactcatttccagagccagaagcagctcagcccatgacaaagaagcgaaaagtagatggtttgagcacagaggcagagcagcccttcattccagtagaggtgctcgtagacctgttcctcaaggaaggtgcctgtgatgaattgttctcctacctcattgagaaagtgaagcgaaagaaaaatgtactacgcctgtgctgtaagaagctgaagatttttgcaatgcccatgcaggatatcaagatgatcctgaaaatggtgcagctggactctattgaagatttggaagtgacttgtacctggaagctacccaccttggcgaaattttctccttacctgggccagatgattaatctgcgtagactcctcctctcccacatccatgcatcttcctacatttccccggagaaggaagagcagtatatcgcccagttcacctctcagttcctcagtctgcagtgcctgcaggctctctatgtggactctttatttttccttagaggccgcctggatcagttgctcaggcacgtgatgaaccccttggaaaccctctcaataactaactgccggctttcggaaggggatgtgatgcatctgtcccagagtcccagcgtcagtcagctaagtgtcctgagtctaagtggggtcatgctgaccgatgtaagtcccgagcccctccaagctctgctggagagagcctctgccaccctccaggacctggtctttgatgagtgtgggatcacggatgatcagctccttgccctcctgccttccctgagccactgctcccagcttacaaccttaagcttctacgggaattccatctccatatctgccttgcagagtctcctgcagcacctcatcgggctgagcaatctgacccacgtgctgtatcctgtccccctggagagttatgaggacatccatggtaccctccacctggagaggcttgcctatctgcatgccaggctcagggagttgctgtgtgagttggggcggcccagcatggtctggcttagtgccaacccctgtcctcactgtggggacagaaccttctatgacccggagcccatcctgtgcccctgtttcatgcctaactagctgggtgcacatatcaaatgcttcattctgcatacttggacactaaagccaggatgtgcatgcatcttgaagcaacaaagcagccacagtttcagacaaatgttcagtgtgagtgaggaaaacatgttcagtgaggaaaaaacattcagacaaatgttcagtgaggaaaaaaaggggaagttggggataggcagatgttgacttgaggagttaatgtgatctttggggagatacatcttatagagttagaaatagaatctgaatttctaaagggagattctggcttgggaagtacatgtaggagttaatccctgtgtagactgttgtaaagaaactgttgaaaataaagagaagcaatgtgaagcaaaaaaaaaaaaaaaaaa

SEQ ID NO: 146 - DNA, 1348 bp, Homo sapiens
caggtggcgtacttggcttggagactggcgcggcgttcgtgtccgagttctctgcaggtcactagtttcccggtagttcagctgcacatgaatagaacagcaatgagagccagtcagaaggactttgaaaattcaatgaatcaagtgaaactcttgaaaaaggatccaggaaacgaagtgaagctaaaactctacgcgctatataagcaggccactgaaggaccttgtaacatgcccaaaccaggtgtatttgacttgatcaacaaggccaaatgggacgcatggaatgcccttggcagcctgcccaaggaagctgccaggcagaactatgtggatttggtgtccagtttgagtccttcattggaatcctctagtcaggtggagcctggaacagacaggaaatcaactgggtttgaaactctggtggtgacctccgaagatggcatcacaaagatcatgttcaaccggcccaaaaagaaaaatgccataaacactgagatgtatcatgaaattatgcgtgcacttaaagctgccagcaaggatgactcaatcatcactgttttaacaggaaatggtgactattacagtagtgggaatgatctgactaacttcactgatattccccctggtggagtagaggagaaagctaaaaataatgccgttttactgagggaatttgtgggctgttttatagattttcctaagcctctgattgcagtggtcaatggtccagctgtgggcatctccgtcaccctccttgggctattcgatgccgtgtatgcatctgacagggcaacatttcatacaccatttagtcacctaggccaaagtccggaaggatgctcctcttacacttttccgaagataatgagcccagccaaggcaacagagatgcttatttttggaaagaagttaacagcgggagaggcatgtgctcaaggacttgttactgaagttttccctgatagcacttttcagaaagaagtctggaccaggctgaaggcatttgcaaagcttcccccaaatgccttgagaatttcaaaagaggtaatcaggaaaagagagagagaaaaactacacgctgttaatgctgaagaatgcaatgtccttcagggaagatggctatcagatgaatgcacaaatgctgtggtgaacttcttatccagaaaatcaaaactgtgatgaccactacagcagagtaaagcatgtccaaggaaggatgtgctgttacctctgatttccagtactggaactaaataagcttcattgtgccttttgtagtgctagaatatcaattacaatgatgatatttcactacagctctgatgaataaaaagttttgtaaaac

SEQ ID NO: 147 - DNA, 1745 bp, Homo sapiens
tggaagcagcgtaaaggatggacaggaatgcagaggtaggcaggaggaccagcagtgtgactgctgaaacccaggggagggccccgcggctctgaggttgctcgcgcgcccccgccgatcgccatggatcggatgaagaagatcaaacggcagctgtcaatgacactccgaggtggccgaggcatagacaagaccaatggtgcccctgagcagataggcctggatgagagtggtggtggtggcggcagtgaccctggagaggcccccacacgtgctgctcctggggaacttcgttctgcacggggcccactcagctctgcaccagagattgtgcacgaggacttgaagatggggtctgatggggagagtgaccaggcttcagccacgtcctcggatgaggtgcagtctccagtgagagtgcgtatgcgcaaccatcccccacgcaagatctccactgaggacatcaacaagcgcctatcactaccagctgacatccggctgcctgagggctacctggagaagctgaccctcaatagccccatctttgacaagcccctcagccgccgcctccgtcgtgtcagcctatctgagattggctttgggaaactggagacctacattaagctggacaaactgggcgagggtacctatgccaccgtctacaaaggcaaaagcaagctcacagacaaccttgtggcactcaaggagatcagactggaacatgaagagggggcaccctgcaccgccatccgggaagtgtccctgctcaaggacctcaaacacgccaacatcgttacgctacatgacattatccacacggagaagtccctcacccttgtctttgagtacctggacaaggacctgaagcagtacctggatgactgtgggaacatcatcaacatgcacaacgtgaaactgttcctgttccagctgctccgtggcctggcctactgccaccggcagaaggtgctacaccgagacctcaagccccagaacctgctcatcaacgagaggggagagctcaagctggctgactttggcctggcccgagccaagtcaatcccaacaaagacatactccaatgaggtggtgacactgtggtaccggccccctgacatcctgcttgggtccacggactactccactcagattgacatgtggggtgtgggctgcatcttctatgagatggccacaggccgtcccctctttccgggctccacggtggaggaacagctacacttcatcttccgtatcttaggaaccccaactgaggagacgtggccaggcatcctgtccaacgaggagttcaagacatacaactaccccaagtaccgagccgaggcccttttgagccacgcaccccgacttgatagcgacggggccgacctcctcaccaagctgttgcagtttgagggtcgaaatcggatctccgcagaggatgccatgaaacatccattcttcctcagtctgggggagcggatccacaaacttcctgacactacttccatatttgcactaaaggagattcagctacaaaaggaggccagccttcggtcttcgtcgatgcctgactcaggcaggccagctttccgcgtggtggacaccgagttctaagccacagaccgaggccccagcaggcagcggctggagggatgccacacccctcacagggcagcccccaactacatcttccctgcttactctctgcctacctgcctgagccatgttcacctgcccacttgtcc

SEQ ID NO: 148 - DNA, 3647 bp, Homo sapiens
agtgaatcggaaaggaggcgccggctgtggcggcggcgggagctgctcggaagctacacctcgcaagggctcccccctttccccaccccctcccccgacccttttcccctccccgggccacccagcccgcccaactcccagcggagagcaaggttttcttctgttttcatagccagccagaacaatgttctacgcacattttgttctcagtaaaagagggcctctggccaaaatttggctagcggcccattgggataagaagctaaccaaagcccatgtgttcgagtgtaatttagagagcagcgtggagagtatcatctcaccaaaggtgaaaatggcattacggacatcaggacatctcttactgggagtagttcgaatctatcacaggaaagccaaataccttcttgcagactgtaatgaagcattcattaagataaagatggcttttcggccaggtgtggttgacctgcctgaggaaaatcgggaagcagcttataatgccattactttacctgaagaatttcatgactttgatcagccactgcctgacttagatgacatcgatgtggcccagcagttcagcttgaatcagagtagagtggaagagataaccatgagagaagaagttgggaacatcagtattttacaagaaaatgattttggtgattttggaatggatgatcgtgagataatgagagaaggcagtgcttttgaggatgacgacatgttagtaagcactactacttctaacctcctattagagtctgaacagagcaccagcaatctgaatgagaaaattaaccatttagaatatgaagatcaatataaggatgataattttggagaaggaaatgatggtggaatattagatgacaaacttattagtaataatgatggcggtatctttgatgatccccctgccctctctgaggcaggggtgatgttgccagagcagcctgcacatgacgatatggatgaggatgataatgtatcaatgggtgggcctgatagtcctgattcagtggatcccgttgaaccaatgccaaccatgactgatcaaacaacacttgttccaaatgaggaagaagcatttgcattggagcctattgatataactgttaaagaaacaaaagccaagaggaagaggaagctaattgttgacagtgtcaaagagttggatagcaagacaattagagcccaacttagtgattattcagatattgttactactttggatctggcaccgcccaccaagaaattgatgatgtggaaagagacaggaggagtagaaaaactgttttctttacctgctcagcctttgtggaataacagactactgaagctctttacacgctgtcttacaccgcttgtaccagaagaccttagaaaaaggaggaaaggaggagaggcagataatttggatgaattcctcaaagaatttgaaaatccagaggttcctagagaggaccagcaacagcagcatcagcagcgtgatgttatcgatgagcccattattgaagagccaagccgcctccaggagtcagtgatggaggccagcagaacaaacatagatgagtcagctatgcctccaccaccacctcagggagttaagcgaaaagctggacaaattgacccagagcctgtgatgcctcctcagcaggtagagcagatggaaataccacctgtagagcttcccccagaagaacctccaaatatctgtcagctaataccagagttagaacttctgccagaaaaagagaaggagaaagagaaggaaaaagaagatgatgaagaggaagaggatgaagatgcatcagggggcgatcaagatcaggaagaaagaagatggaacaaaaggactcagcagatgcttcatggtcttcagcgtgctcttgctaaaactggagctgaatctatcagtttgcttgagttatgtcgaaatacgaacagaaaacaagctgccgcaaagttctacagcttcttggttcttaaaaagcagcaagctattgagctgacacaggaagaaccgtacagtgacatcatcgcaacacctggaccaaggttccatattatataaggagctagaagcattatagctagtgtttgattcactagtgcttacaaattgcccccatgtgtaggggacacagaaccctttgagaaaacttagatttttgtctgtacaaagtctttgcctttttccttcttcatttttttccagtacattaaatttgtcaatttcatctttgagggaaactgattagatgggttgtgtttgtgttctgatggagaaaacagcaccccaaggactcagaagatgattttaacagttcagaacagatgtgtgcaatattggtgcatgtaataatgttgagtggcagtcaaaagtcatgatttttatcttagttcttcattactgcattgaaaaggaaaacctgtctgagaaaatgcctgacagtttaatttaaaactatggtgtaagtctttgacaagaaaaaaaaacaaacaaacacttctttccatcagtaacactggcaatcttcctgttaaccactctccttagggatggtatctgaaacaacaatggtcaccctcttgagattcgttttaagtgtaattccataatgagcagaggtgtacgcgaaattgtgttatgactgatagccttcagctacaaaaagataggactgacctggtttaaagtgttctattttgtaaatcattccatttgagtctttctgatgaacttggctatactgaaatctgttattttagtgaggctccaaaatgagcaaagctaggcctgattagagtagagtgactattaaaaaacataactttctaggagctataaatcaaagttttaaaaagatgtttggatatatttgagtattccgatcatgaaaacagaaattgccctgcctactacaaggacagactgatgggaaattatgcacctggtcaacttagcttttaagcagacgatgctgtaaaaactaacggcttctctgatatttattgtaagttttagtactgatctccttttccagtgctgcacactcctggtttggaactttaatagcgttgcaacgaaatcctatatccagtttcctgtaatttaattgaagaaaaatacatccaaataaagactttattattaacagaccagatagcatcagaaatcatgtgactgttatgattatcagaatatgtcttaactttttagggcaaagttaacactgaaagttctagcttaagtgttgaaacttttgtgggaaaaaaaaatcacttttgaaactcagacttcagtgtatacccaataatttaaaattatgtgaaatgttttaaatttgtgaactcgtaattactgttttaatgattcagtttcttcagagtggtaattgtataaaattgctattgcagctttatattcaatatgatgtgcctgtaaaccaaggagttttccccgtttgtaaaaagacattgtagataattgaatgtttgattttagaaaggtcattagtttcttgttacacattttgttagtctggtttttgttgcttatcgggtttaatattgttcttgaaaatagttgatgctatgttatgtataacttttctaataaaagttgtgttataagctgt

SEQ ID NO: 149 - DNA, 2820 bp, Homo sapiens
ccgcggagttacgggaaagttggtccgagttcccagagtttccctctgtggtgccctaggcttcggcccggtgccccggctcctttcctcctttcggccttcgccgtccaccaggtccctctctctgtcccggccgccatggagcagccgccggcgcctaagagtaaactaaaaaagctgagtgaagacagtttgactaagcagcctgaagaagtttttgatgtattagagaagcttggagaagggtcttatggaagtgtatttaaagcaatacacaaggaatccggtcaagttgtcgcaattaaacaagtacctgttgaatcagatcttcaggaaataatcaaagaaatttccataatgcagcaatgtgacagcccatatgttgtaaagtactatggcagttattttaagaatacagacctctggattgttatggagtactgtggcgctggctctgtctcagacataattagattacgaaacaagacattaatagaagatgaaattgcaaccattcttaaatctacattgaaaggactagaatatttgcactttatgagaaaaatacacagagatataaaagctggaaatattctcctcaatacagaaggacatgcaaaattggcagattttggagtggctggtcagttaacagatacaatggcaaaacgcaatactgtaataggaactccattttggatggctcctgaggtgattcaagaaataggctataactgtgtggccgacatctggtcccttggcattacttctatagaaatggctgaaggaaaacctccttatgctgatatacatccaatgagggctatttttatgattcccacaaatccaccaccaacattcagaaagccagaactttggtccgatgatttcaccgattttgttaaaaagtgtttggtgaagaatcctgagcagagagctactgcaacacaacttttacagcatccttttatcaagaatgccaaacctgtatcaatattaagagacctgatcacagaagctatggagatcaaagctaaaagacatgacgaacagcaacgagaattggaagaggaagaagaaaattcggatgaagatgagctggattcccacaccatggtgaagactagtgtgggagagtgtggcaccatgcgggccacaagcacgatgagtgaaggggcccagaccatgattgaacataatagcacgatgttggaatccgacttggggaccatggtgataaacagtgaggatgaggaagaagaagatggaactatgaaaagaaatgcaacctcaccacaagtacaaagaccatctttcatggactactttgataagcaagacttcaagaataagagtcacgaaaactgtaatcagaacatgcatgaacccttccctatgtccaaaaacgtttttcctgataactggaaagttcctcaagatggagactttgactttttgaaaaatctaagtttagaagaactacagatgcggttaaaagcactggaccccatgatggaacgggagatagaagaacttcgtcagagatacactgcgaaaagacagcccattctggatgcgatggatgcaaagaaaagaaggcagcaaaacttttgagtctaatttcctctctgtttttaactattctggagaccaagaaaccactaggaattgaaggaatatttggatatttttaatcctaagattttgccctacaattaggcagaggtcaaaaagtgacaatggtacatgcccaggtaaattcccaaaaggcagaattgacagttgtatctgctgtgcattcactctaagatgaggagaacaaaagaagtgtattctcttgttctgtcagctgcataccagtaataaaactgttatgaaatggattttcaaggtctctaaaccttgaaaatccaaaggctattgttgcattgtacagcactgaaagggctttatgttacaatattctttattcctatctagtatactaggctatttattgtccccttaggtaaacttatttatttatgctattttggctttgtttcattttttaaggacaagatcaggatagctttggtgaaggtagggtcatattaatatgatgataatgtgcaaccaatttatactttctgcagggagctatggggtacattccttgatttccaggatagtttttcaaataggaaagcaataatggcagtagttctcaaatgggctaggccttttttatattgaagcaataattccatttttaccctttgaaattttgtttttttgatttttgatgtttggtacaaatagaactatatatatttaggtaaaatagatctatcgtgtttaaaaccaaagaaatcaatggaacccttgcacaaaaaagtgtgataaatatttttaaataaaaacttaatacaaatgtaatttgttaatattgtttcatgttttatgtgtagatctaatagctgaactgattcaaactgtaataagctcatcaatttcatttctatgaaaatgtgctctgttgtcacaggatgtttctgttgattttattcatttcctgggaattggtaaacatcatgttcctgatgataacccagtagcaaaaacatttgtactgagtggtacaagccttggggactgaaaaaaaaaaaagattaaaaccattaaaaagaaactcatttttacgctgaatgaacatttatatgattgcattgggaccagtcatttcctaagctacatatggccatcttgacagtgttttttcttttgtgtgtttaattattatgtgtaaatcataaagacaaataaatttcactgtgccac

SEQ ID NO: 150 - DNA, 2221 bp, Homo sapiens
cgcgggggcgggcgcgcaccgggagcgcgtcggaggcgagtggaactggatcgggtttgctgccagcggcgtgagcttcggccgccattttacaacagctccactcgcgccggacacagggagcagcgagcacgcgtttcccgcaacccgataccatcggacaggatttctccgcctcagcccaacggggagatctctggaaacatggctacagaacatgttaatggaaatggtactgaagagcccatggatactacttctgcagttatccattcagaaaattttcagacattgcttgatgctggtttaccacagaaagttgctgaaaaactagatgaaatttacgttgcagggctagttgcacatagtgatttagatgaaagagctattgaagctttaaaagaattcaatgaagacggtgcattggcagttcttcaacagtttaaagacagtgatctctctcatgttcagaacaaaagtgcctttttatgtggagtcatgaagacttacaggcagagagaaaaacaagggaccaaagtagcagattctagtaaaggaccagatgaggcaaaaattaaggcactcttggaaagaacaggctacacacttgatgtgaccactggacagaggaagtatggaggaccacctccagattccgtttattcaggtcagcagccttctgttggcactgagatatttgtgggaaagatcccaagagatctatttgaggatgaacttgttccattatttgagaaagctggacctatatgggatcttcgtctaatgatggatccactcactggtctcaatagaggttatgcgtttgtcactttttgtacaaaagaagcagctcaggaggctgttaaactgtataataatcatgaaattcgttctggaaaacatattggtgtctgcatctcagttgccaacaataggctttttgtgggctctattcctaagagtaaaaccaaggaacagattcttgaagaatttagccaagtaacagagggtcttacagacgtcattttataccaccaaccggatgacaagaaaaaaaacagaggcttttgctttcttgaatatgaagatcacaaaacagctgcccaggcaaggcgtaggttaatgagtggtaaagtcaaggtctgggggaatgttggaactgttgaatgggctgatcctatagaagatcctgatcctgaggttatggcaaaggtaaaagtgctgtttgtacgcaaccttgccaatactgtaacagaagagattttagaaaaggcatttagtcagtttgggaaactggaacgagtgaagaagttaaaagattatgcgttcattcattttgatgagcgagatggtgctgtcaaggctatggaagaaatgaatggcaaagacttggagggagaaaatattgaaattgtttttgccaagccaccagatcagaaaaggaaagaaagaaaagctcagaggcaagcagcaaaaaatcaaatgtatgacgattactactattatggtccacctcatatgccccctccaacaagaggtcgagggcgtggaggtagaggtggttatggatatcctccagattattatggatatgaagattattatgattattatggttatgattaccataactatcgtggtggatatgaagatccatactatggttatgaagattttcaagttggagctagaggaaggggtggtagaggagcaaggggtgctgctccatccagaggtcgtggggctgctcctccccgcggtagagccggttattcacagagaggaggtcctggatcagcaagaggcgttcgaggtgcgagaggaggtgcccaacaacaaagaggccgcgggcagggaaaaggggtcgaggccggtcctgacctgttacaatgaagactgacttgctatgtgggattacaccagaagcttgcagtggagtaatggtaaggaaatcaagcaaccttaaatatgtcggctgtataggagcatattctattgcagaagaccttcctatgaagatcatggaatcaaatacgggacattgaactaatacttggactttgatatgaatttctttaacaattttctctgcagtgcaagttattaaactaaagctactctattttcaaaatgtgttccaacagaaatccttcataactcctagcatggtatcttaataaagaataaagttcttttaaaaatcaaaaaaaaaaaaaaaaaa

SEQ ID NO: 151 - DNA, 817 bp, Homo sapiens
agtcctgcgtccgggccccgaggcgcagcagggcaccaggtggagcaccagctacgcgtggcgcagcgcagcgtccctagcaccgagcctcccgcagccgccgagatgctgcgaacagagagctgccgccccaggtcgcccgccggacaggtggccgcggcgtccccgctcctgctgctgctgctgctgctcgcctggtgcgcgggcgcctgccgaggtgctccaatattacctcaaggattacagcctgaacaacagctacagttgtggaatgagatagatgatacttgttcgtcttttctgtccattgattctcagcctcaggcatccaacgcactggaggagctttgctttatgattatgggaatgctaccaaagcctcaggaacaagatgaaaaagataatactaaaaggttcttatttcattattcgaagacacagaagttgggcaagtcaaatgttgtgtcgtcagttgtgcatccgttgctgcagctcgttcctcacctgcatgagagaagaatgaagagattcagagtggacgaagaattccaaagtccctttgcaagtcaaagtcgaggatattttttattcaggccacggaatggaagaaggtcagcagggttcatttaaaatggatgccagctaattttccacagagcaatgctatggaatacaaaatgtactgacattttgttttcttctgaaaaaaatccttgctaaatgtactctgttgaaaatccctgtgttgtcaatgttctcagttgtaacaatgttgtaaatgttcaatttgttgaaaattaaaaaatctaaaaataaa

SEQ ID NO: 152 - DNA, 2717 bp, Homo sapiens
cagggtaacgctgtcttgtggacccgcacttcccacccgagacctctcactgagcccgagccgcgcgcgacatgagccacgggaagggaaccgacatgctcccggagatcgccgccgccgtgggcttcctctccagcctcctgaggacccggggctgcgtgagcgagcagaggcttaaggtcttcagcggggcgctccaggaggcactcacagagcactacaaacaccactggtttcccgaaaagccgtccaagggctccggctaccgctgcattcgcatcaaccacaagatggaccccatcatcagcagggtggccagccagatcggactcagccagccccagctgcaccagctgctgcccagcgagctgaccctgtgggtggacccctatgaggtgtcctaccgcattggggaggacggctccatctgcgtcttgtacgaggaggccccactggccgcctcctgtgggctcctcacctgcaagaaccaagtgctgctgggccggagcagcccctccaagaactacgtgatggcagtctccagctaggcccttccgcccccgccctgggcgccgccgtgctcatgctgccgtgacaacaggccaccacatacctcaacctggggaactgtatttttaaatgaagagctatttatatatattatttttttttaagaaaggaggaaaagaaaccaaaagttttttttaagaaaaaaaatccttcaagggagctgcttggaagtggcctccccaggtgcctttggagagaactgttgcgtgcttgagtctgtgagccagtgtctgcctataggagggggagctgttagggggtagacctagccaaggagaagtgggagacgtttggctagcaccccaggaagatgtgagagggagcaagcaaggttagcaactgtgaacagagaggtcgggatttgccctgggggaggaagagaggccaagttcagagctctctgtctcccccagccagacacctgcatccctggctcctctattactcaggggcattcatgcctggacttaaacaatactatgttatcttttcttttatttttctaatgaggtcctgggcagagagtgaaaaggcctctcctgattcctactgtcctaagctgcttttcttgaaatcatgacttgtttctaattctaccctcaggggcctgtagatgttgctttccagccaggaatctaaagctttgggttttctgagggggggaggagggaactggaggttattggggttaggatggaagggaactctgcacaaaacctttgctttgctagtgctgctttgtgtgtatgtgtggcaaataatttgggggtgatttgcaatgaaattttgggacccaaagagtatccactggggatgttttttggccaaaactcttccttttggaaccacatgaaagtcttgatgctgctgccatgatccctttgagaggtggctcaaaagctacagggaactccaggtcctttattactgccttcttttcaaaagcacaactctcctctaaccctcccctcccccttcccttctggtcgggtcatagagctaccgtattttctaggacaagagttctcagtcactgtgcaatatgccccctgggtcccaggagggtctggaggaaaactggctatcagaacctcctgatgccctggtgggcttagggaaccatctctcctgctctccttgggatgatggctggctagtcagccttgcatgtattccttggctgaatgggagagtgccccatgttctgcaagactacttggtattcttgtagggccgacactaaataaaagccaaaccttgggcactgttttttctccctggtgctcagagcacctgtgggaaaggttgctgtctgtctcagtacaatccaaatttgtcgtagacttgtgcaatatatactgttgtgggttggagaaaagtggaaagctacactgggaagaaactcccttccttcaatttctcagtgacattgatgaggggtcctcaaaagacctcgagtttcccaaaccgaatcaccttaagaaggacagggctagggcatttggccaggatggccaccctcctgctgttgccccttagtgaggaatcttcaccccacttcctctacccccaggttctcctccccacagccagtcccctttcctggatttctaaactgctcaattttgactcaaaggtgctatttaccaaacactctccctacccattcctgccagctctgcctccttttcaactctccacattttgtattgccttcccagacctgcttccagtctttattgctttaaagttcactttgggcccacagacccaagagctaattttctggtttgtgggttgaaacaaagctgtgaatcactgcaggctgtgttcttgcatcttgtctgcaaacaggtccctgcctttttagaagcagcctcatggtctcatgcttaatcttgtctctcttctcttctttatgatgttcactttaaaaacaacaaaacccctgagctggactgttgagcaggcctgtctctcctattaagtaaaaataaatagtagtagtatgtttgtaagctattctgacagaaaagacaaaggttactaattgtatgatagtgtttttatatggaagaatgtacagcttatggacaaatgtacacctttttgttactttaataaaaatgtagtaggataaaaaaaaa

SEQ ID NO: 153 - DNA, 3915 bp, Homo sapiens
gtggggtggggtggggctgggggcttgtcgccctttcaggctccaccctttgcggagattataaatagtcatgatcccagcgagacccagagatgcctgtaatggtgagactttggatccttcctgaggacgtggagaaaactttctgctgagaaggacattttgaaggttttgttggctgaaaaagctgtttctggaatcacccctagatctttcttgaagacttgaattagattacagcgatggggacacagaaggtcaccccagctctgatatttgccatcacagttgctacaatcggctctttccaatttggctacaacactggggtcatcaatgctcctgagaagatcataaaggaatttatcaataaaactttgacggacaagggaaatgccccaccctctgaggtgctgctcacgtctctctggtccttgtctgtggccatattttccgtcgggggtatgatcggctccttttccgtcggactcttcgtcaaccgctttggcaggcgcaattcaatgctgattgtcaacctgttggctgtcactggtggctgctttatgggactgtgtaaagtagctaagtcggttgaaatgctgatcctgggtcgcttggttattggcctcttctgcggactctgcacaggttttgtgcccatgtacattggagagatctcgcctactgccctgcggggtgcctttggcactctcaaccagctgggcatcgttgttggaattctggtggcccagatctttggtctggaattcatccttgggtctgaagagctatggccgctgctactgggttttaccatccttcctgctatcctacaaagtgcagcccttccattttgccctgaaagtcccagatttttgctcattaacagaaaagaagaggagaatgctaagcagatcctccagcggttgtggggcacccaggatgtatcccaagacatccaggagatgaaagatgagagtgcaaggatgtcacaagaaaagcaagtcaccgtgctagagctctttagagtgtccagctaccgacagcccatcatcatttccattgtgctccagctctctcagcagctctctgggatcaatgctgtgttctattactcaacaggaatcttcaaggatgcaggtgttcaagagcccatctatgccaccatcggcgcgggtgtggttaatactatcttcactgtagtttctctatttctggtggaaagggcaggaagaaggactctgcatatgataggccttggagggatggctttttgttccacgctcatgactgtttctttgttattaaaggataactataatgggatgagctttgtctgtattggggctatcttggtctttgtagccttctttgaaattggaccaggccccattccctggtttattgtggccgaactcttcagccagggcccccgcccagctgcgatggcagtggccggctgctccaactggacctccaacttcctagtcggattgctcttcccctccgctgctcactatttaggagcctacgtttttattatcttcaccggcttcctcattaccttcttggcttttaccttcttcaaagtccctgagacccgtggcaggacttttgaggatatcacacgggcctttgaagggcaggcacacggtgcagatagatctggaaaggacggcgtcatggagatgaacagcatcgagcctgctaaggagaccaccaccaatgtctaagtcgtgcctccttccacctccctcccggcatgggaaagccacctctccctcaacaagggagagacctcatcaggatgaacccaggacgcttctgaatgctgctacttaattcctttctcatcccacgcactccatgagcaccccaaggctgcggtttgttggatcttcaatggctttttaaattttatttcctggacatcctcttctgcttaggagagaccgagtgaacctaccttcatttcaggagggattggccgcttggcacatgacaactttgccagcttttcctcccttgggttctgatattgccgcactaggggatataggagaggaaaagtaaggtgcagttcccccaacctcagacttaccaggaagcagatacatatgagtgtggaagccggagggtgtttatgtaagagcaccttcctcacttccatacagctctacgtggcaaattaacttgagttttatttattttatcctctggtttaattacataatttttttttttttactttaagtttcaggatacatgtgccgaatgtgcaggtttgttacataggtatatatatgccatgatggaaatatttatttttttaagcgtaattttgccaaataataaaaacagaaggaaattgagattagagggaggtgtttaaagagaggttatagagtagaagatttgatgctggagaggttaaggtgcaataagaatttagggagaaatgttgttcattattggagggtaaatgatgtggtgcctgaggtctgtacgttacctcttaacaatttctgtccttcagatggaaactctttaacttctcgtaaaagtcatatacctatataataaagctactgatttccttggagcttttttctttaagataatagtttacatgtagtagtacttgaaatctaggattattaactaatatgggcattgtagttaatgatggttgatgggttctaattttggatggagtccagggaagagaaagtgatttctagaaagcctgttcccctcactggatgaaataactccttcttgtagtagtctcattacttttgaagtaatcccgccacctatctcgtgggagagccatccaaataagaaacctaaaataattggttcttggtagagattcattatttttccactttgttctttaggagattttaggtgttgattttctgttgtattttaactcatacctttaaaggaattccccaaagaatgtttatagcaaacttggaatttgtaacctcagctctgggagaggatttttttctgagcgattattatctaaagtgtgttgttgctttaggctcacggcacgcttgcgtatgtctgttaccatgtcactgtggtcctatgccgaatgccctcaggggacttgaatctttccaataaaccaggtttagacagtatgagtcaatgtgcagtgtagcccacacttgagaggatgaatgtatgtgcactgtcactttgctctgggtggaagtacgttattgttgacttattttctctgtgtttgttcctacagcccctttttcatatgttgctcagtctccctttcccttcttggtgcttacacatctcagaccctttagccaaacccttgtcagtgacagtattttggttcttagttctcactgttccctctgctcctggagcctttgaataaaaatgcacgtagctgaggccggatgcggtggctcacgcctgtaatcccagcactttgggaggcctaggcgggcggtcaggggttcgagaccagtctggccaacatcgtgaaaccctgtctctactaaaaatgcaaaaattagccgggcgtggtggcgggcgcctgtaatcccagctacttgggaagctgaggcgggagaatcatgtgaacccgggacgcaggggttgcagtgagcggagatcgcatcattgcactctagcctgggccacagggcgagactccgtctcaaaaaaaaaaaaatgcacatagctatcgagtgtgctttagcttgaaaaggtgaccttgcaacttcatgtcaactttctggctcctcaaacagtaggttggcagtaaggcagggtcccatttctcactgagaagattgtgaatatttccatatggattttctattgttactctggttctttgttttaaaataaaaattctgaatgtacacg

SEQ ID NO: 154 - DNA, 2019 bp, Homo sapiens
tgggtcacggctgcttcccaccagcaaagaccacgactggagagccgagccggaggcagctgggaaacatgaagagcgtcttgctgctgaccacgctcctcgtgcctgcacacctggtggccgcctggagcaataattatgcggtggactgccctcaacactgtgacagcagtgagtgcaaaagcagcccgcgctgcaagaggacagtgctcgacgactgtggctgctgccgagtgtgcgctgcagggcggggagaaacttgctaccgcacagtctcaggcatggatggcatgaagtgtggcccggggctgaggtgtcagccttctaatggggaggatccttttggtgaagagtttggtatctgcaaagactgtccctacggcaccttcgggatggattgcagagagacctgcaactgccagtcaggcatctgtgacagggggacgggaaaatgcctgaaattccccttcttccaatattcagtaaccaagtcttccaacagatttgtttctctcacggagcatgacatggcatctggagatggcaatattgtgagagaagaagttgtgaaagagaatgctgccgggtctcccgtaatgaggaaatggttaaatccacgctgatcccggctgtgatttctgagagaaggctctattttcgtgattgttcaacacacagccaacattttaggaactttctagatatagcataagtacatgtaatttttgaagatccaaattgtgatgcatggtggatccagaaaacaaaaagtaggatacttacaatccataacatccatatgactgaacacttgtatgtgtttgttaaatattcgaatgcatgtagatttgttaaatgtgtgtgtatagtaacactgaagaactaaaaatgcaatttaggtaatcttacatggagacaggtcaaccaaagagggagctaggcaaagctgaagaccgcagtgagtcaaattagttctttgactttgatgtacattaatgttgggatatggaatgaagacttaagagcaggagaagatggggagggggtgggagtgggaaataaaatatttagcccttccttggtaggtagcttctctagaatttaattgtgctttttttttttttttggctttgggaaaagtcaaaataaaacaaccagaaaacccctgaaggaagtaagatgtttgaagcttatggaaatttgagtaacaaacagctttgaactgagagcaatttcaaaaggctgctgatgtagttcccgggttacctgtatctgaaggacggttctggggcataggaaacacatacacttccataaatagctttaacgtatgccacctcagagataaatctaagaagtattttacccactggtggtttgtgtgtgtatgaaggtaaatatttatatatttttataaataaatgtgttagtgcaagtcatcttccctacccatatttatcatcctcttgaggaaagaaatctagtattatttgttgaaaatggttagaataaaaacctatgactctataaggttttcaaacatctgaggcatgataaatttattatccataattataggagtcactctggatttcaaaaaatgtcaaaaaatgagcaacagagggaccttatttaaacataagtgctgtgacttcggtgaattttcaatttaaggtatgaaaataagtttttaggaggtttgtaaaagaagaatcaattttcagcagaaaacatgtcaactttaaaatataggtggaattaggagtatatttgaaagaatcttagcacaaacaggactgttgtactagatgttcttaggaaatatctcagaagtattttatttgaagtgaagaacttatttaagaattatttcagtatttacctgtattttattcttgaagttggccaacagagttgtgaatgtgtgtggaaggcctttgaatgtaaagctgcataagctgttaggttttgttttaaaaggacatgtttattattgttcaataaaaaagaacaagatac

SEQ ID NO: 155 - DNA, 5210 bp, Homo sapiens
ccagaggctgagcccgggcgagcccgccgtgcgcacagctctgcccgccgcccctggagcggatccccagccgtccctgggcgttctcccgggttctagcaaagccccccggggtgcccatcagtttccttgggtgactacagcgtgtgttttttctttcctctttcccctgcctgtgtgcccttctccaggatggcagaggcggaattgcacaaggaaaggctgcaagccatagcagaaaaaagaaagaggcagactgaaatagaaggcaagcgacaacagcttgacgagcagatacttctgctgcagcattccaagtccaaagtgcttcgggagaaatggctgctgcagggcatacccgctggaactgccgaagaggaggaagccaggaggcggcagtctgaagaggatgagttcagagtcaagcaacttgaagataacattcagaggctggagcaagaaatacaaacgctagaaagtgaagagtcccagatatctgccaaagagcaaatcatcctagagaaactgaaggaaacagaaaaatccttcaaggactttcagaagggtttctccagtacggatggagatgcagtaaattacatttcctcccagcttcccgacctgccaatcctctgttcacgaacagcagaaccatcacctgggcaggacgggaccagcagagcggctggagtcgggtgggagaatgtgctgctaaaggaaggtgagtcagcctcgaacgccacagaaacatccggcccagacatgactatcaagaagcctccccagctttctgaggatgatatctggctaaaaagcgagggagacaactatagtgccaccctcctggagcctgctgccagctctctttccccagatcacaaaaacatggaaattgaggtgtctgttgcagaatgtaaaagtgttcctggaatcacctctaccccacatcccatggaccatccctccgctttctattcacccccgcataatggcctccttactgatcaccacgaatccctggataatgatgttgccagagagatccgctatctagatgaggtgctagaggccaactgctgtgattctgctgtggatggaacgtacaatggaacatcctccccagagcctggtgcagtggttctggtgggcggcctaagcccccctgtccacgaggcgacccagccagaacccactgaaagaacagctagccggcaggcacctcctcacatcgagctcagtaatagcagccctgaccccatggcagaggcagaaagaacaaatggccattcccccagccagcctagagatgcgctgggggacagcctgcaggtgcctgtcagccccagctccacaaccagctcacggtgttcttcccgagatggagagttcactctcaccacactgaaaaaggaggccaagtttgagctgcgtgccttccatgaggacaagaagccctccaagctctttgaggatgacgagcatgagaaagaacaatactgcattagaaaagtgaggccttcagaggagatgctggagctggaaaaggagaggagagagctcatccgcagccaggccgtcaagaagaatcctggcattgcagcaaaatggtggaatcccccgcaggaaaaaaccatcgaggagcagctggacgaggaacatctggagtcgcacaaaaagtacaaggagcgcaaagagagaagggcacagcaggaacagttgctgctgcagaagcagttacagcagcagcagcagcagcccccatcgcagctctgcacagcccctgcctcttctcatgaacgcgcaagcatgattgacaaagcaaaggaggacattgtcacagagcagatagatttctctgctgctcgcaaacaatttcagctgatggagaattccaggcaagcggtggccaagggccagagtacacccaggctgttctccatcaagcctttctacaggcctctggggtcagtcaactcagacaagccactgactaatccgagaccaccttctgtcgggggacctccagaagacagtggtgcctcagccgccaagggacagaaatcccccggtgccctggagaccccatcggcagcaggaagccagggcaacacagcctctcaggggaaggaagggccctacagcgagccttctaaacgtgggcccttatctaaactgtgggctgaggatggagaatttacgagcgcccgggctgtcctcactgtggtcaaggatgatgaccatgggattttggatcagttctcaagatctgtcaatgtctccttgacccaagaggagcttgactctggtctggacgaattgtcggtgaggtctcaggataccacagtcctggagaccctatccaatgatttcagcatggacaacatcagtgacagcggggcatccaatgagacaaccaatgccctccaggaaaattcactggctgatttttctctgccccagacaccacaaactgacaacccctcagagggccgaggagaaggcgtctccaagtcatttagtgatcatggtttctattccccttcctccacgctgggggactctccgttggttgatgaccccttggagtatcaggctggcctcctggtgcagaatgccattcaacaagccatagccgagcaggtggataaagctgtgtccaaaaccagcagggatggagcagagcaacagggacctgaagcgactgtagaggaagctgaagctgcggctttcggctcagaaaagcctcagagcatgtttgagccacctcaggtgtcttctcctgttcaagagaaaagggatgtattaccaaagattctgcctgctgaagacagggcgctcagggaaagggggcccccccagccactgccagctgtgcagcccagtggcccgattaacatggaggagaccaggcccgaaggaagctatttcagcaagtactcggaggcagctgagctgagaagcacagcctccctcctggccactcaagaatctgacgtgatggttgggcctttcaagctgaggtccaggaaacagcggactttgtccatgattgaggaagagatccgagcagctcaggaaagggaagaggagctgaagaggcagagacaagtcttgcagagtacgcagagccccaggacaaagaatgccccatcactgccctccagaacatgctacaaaactgctccagggaaaatagagaaagtcaaacctcctccatcccccaccactgaaggccccagcctgcagcctgacttagcccctgaagaggctgccggaacccagcggcccaagaatctgatgcagaccctcatggaagactatgagacacacaaatctaaaaggcgcgagagaatggatgatagtagttacacttctaagttactgtcttgcaaggtgacttccgaggtcctcgaggccacacgggttaatcgaagaaagagcgcactggctttgcgctgggaagcagggatctatgccaaccaggaggaagaagacaacgaataaacttccttcaacccaggaagcgtctttggtgcttgggagaccaagaaaccaagaaattaacaactgaaagcattttaatggactatttattaaagtgcaaacaaactcagcaatccttatgtagaccagaagctgcaatatacaatgatgaaaatgaaacgaaaaggaagtccccccatcagactctggacacccaggaatcaaaagagaaaggacttttttggtgactcaatcccagtgtctggtttggggccaatctacaatggatccaaaaggacaaaacatgttacaagcaaatcaacatagttgctgcaggcggaactgagaccagcctctctgggcgatgaaggacaatggtggtagggccacttagagagcagtagggcccaggctggtgcagcctacatggcacaggatatttccctgcaccagtttcccacctgtcacttgcagcatcagagggtgttgcattaactccattttctccagcagccataaaatgaatggcgtttctctccatatttgcccagaagaggcagttatgattccacttctcctacatttaattatttttaattgagaacaactcatgatcacaattcataaaatccatattttaagacaatagttcttcatgtcacaaacacaatctattctacatgaggaggctgagaaaggggaagagaaaaacaaaccaaatggatgatgttagctttaggatcgtgtctgcttataatattcactgatctgcagtttatgagaacacattttcacagttatgtttcttcataggaaaactatatttagtgggcaacaactatttttatgatgggatgggggagtatatacacgtatagaatctgtacgcgttgaacaacttggttcaagatggtgggggcatttttagagcggcaataattgaaaaaaaaggcgaactctgccttggagaggtagatgataagaaataaaaaggtgtttataactattttgtattataaagtgggccttagagataggaagaagaatgatggattccttttggatcaatcagaaaggaaacacgaaagaaaagtcaggaaggtagagagagaaaaagggagggaaggagaaagaatgggaataaaataaggaggtaagagatactatttttgctgagcaaccagtgtgtttcaggatgatacaaagaaaaatatagaatagaaataagtgcaggcttggaatcagctacaaatcctaaagatggggtgtgtgtggatgtgtgtgtgtgtgtgtgtacaccattgtgtgtttgtaaaatgtgtatgttcatgagtaagggtgtgtgtgtgtgtgtattaaaattccagagtgaccgtggcacttgggtgtacaggtaattcctccagagctgtttgctggcttcaggagtggagtgagaatttcttttttatgaaaagggatataaaggcaccgagctgatgcagtatttgtaatattaagttgacctaacaaggtatttgcatgagtcacaattacaaagttttgagcggttttgtaatttgacatttaggaaagtctcctatttattctcatactttacattcatgcttagtatactatagaggatgccagctttaatctttctgtcatttaaagcaatatgataagggtattcaataattgggtgccctaaatttctggatgagaaaattttcaattctggccag

SEQ ID NO: 156 - DNA, 2076 bp, Homo sapiens
aggttgctcagctgcccccggagcggttcctccacctgaggcagacaccacctcggttggcatgagccggcgcccctgcagctgcgccctacggccaccccgctgctcctgcagcgccagccccagcgcagtgacagccgccgggcgccctcgaccctcggatagttgtaaagaagaaagttctaccctttctgtcaaaatgaagtgtgattttaattgtaaccatgttcattccggacttaaactggtaaaacctgatgacattggaagactagtttcctacacccctgcatatctggaaggttcctgtaaagactgcattaaagactatgaaaggctgtcatgtattgggtcaccgattgtgagccctaggattgtacaacttgaaactgaaagcaagcgcttgcataacaaggaaaatcaacatgtgcaacagacacttaatagtacaaatgaaatagaagcactagagaccagtagactttatgaagacagtggctattcctcattttctctacaaagtggcctcagtgaacatgaagaaggtagcctcctggaggagaatttcggtgacagtctacaatcctgcctgctacaaatacaaagcccagaccaatatcccaacaaaaacttgctgccagttcttcattttgaaaaagtggtttgttcaacattaaaaaagaatgcaaaacgaaatcctaaagtagatcgggagatgctgaaggaaattatagccagaggaaattttagactgcagaatataattggcagaaaaatgggcctagaatgtgtagatattctcagcgaactctttcgaaggggactcagacatgtcttagcaactattttagcacaactcagtgacatggacttaatcaatgtgtctaaagtgagcacaacttggaagaagatcctagaagatgataagggggcattccagttgtacagtaaagcaatacaaagagttaccgaaaacaacaataaattttcacctcatgcttcaaccagagaatatgttatgttcagaaccccactggcttctgttcagaaatcagcagcccagacttctctcaaaaaagatgctcaaaccaagttatccaatcaaggtgatcagaaaggttctacttatagtcgacacaatgaattctctgaggttgccaagacattgaaaaagaacgaaagcctcaaagcctgtattcgctgtaattcacctgcaaaatatgattgctatttacaacgggcaacctgcaaacgagaaggctgtggatttgattattgtacgaagtgtctctgtaattatcatactactaaagactgttcagatggcaagctcctcaaagccagttgtaaaataggtcccctgcctggtacaaagaaaagcaaaaagaatttacgaagattgtgatctcttattaaatcaattgttactgatcatgaatgttagttagaaaatgttaggttttaacttaaaaaaaattgtattgtgattttcaattttatgttgaaatcggtgtagtatcctgaggtttttttccccccagaagataaagaggatagacaacctcttaaaatatttttacaatttaatgagaaaaagtttaaaattctcaatacaaatcaaacaatttaaatattttaagaaaaaaggaaaagtagatagtgatactgagggtaaaaaaaaaattgattcaattttatggtaaaggaaacccatgcaattttacctagacagtcttaaatatgtctggttttccatctgttagcatttcagacattttatgttcctcttactcaattgataccaacagaaatatcaacttctggagtctattaaatgtgttgtcacctttctaaagctttttttcattgtgtgtatttcccaagaaagtatcctttgtaaaaacttgcttgttttccttatttctgaaatctgttttaatatttttgtatacatgtaaatatttctgtattttttatatgtcaaagaatatgtctcttgtatgtacatataaaaataaattttgctcaataaaattgtaagcttaaaaaaaaaaaaaaaaaactcgagactagtgc

SEQ ID NO: 157 - DNA, 2115 bp, Homo sapiens
gaaatgaacctctcttattgatttttattggcctagagccaggagtactgcattcagttgactttcagggtaaaaagaaaacagtcctggttgttgtcatcataaacatatggaccagtgtgatggtgaaatgagatgaggctccgcaatggaactgtagccactgctttagcatttatcacttccttccttactttgtcttggtatactacatggcaaaatgggaaagaaaaactgattgcttatcaacgagaattccttgctttgaaagaacgtcttcgaatagctgaacacagaatctcacagcgctcttctgaattaaatacgattgtgcaacagttcaagcgtgtaggagcagaaacaaatggaagtaaggatgcgttgaataagttttcagataataccctaaagctgttaaaggagttaacaagcaaaaaatctcttcaagtgccaagtatttattatcatttgcctcatttattgaaaaatgaaggaagtcttcaacctgctgtacagattggcaacggaagaacaggagtttcaatagtcatgggcattcccacagtgaagagagaagttaaatcttacctcatagaaactcttcattcccttattgataacctgtatcctgaagagaagttggactgtgttatagtagtcttcataggagagacagatattgattatgtacatggtgttgtagccaacctggagaaagaattttctaaagaaatcagttctggcttggtggaagtcatatcaccccctgaaagctattatcctgacttgacaaacctaaaggagacatttggagactccaaagaaagagtaagatggagaacaaagcaaaacctagattactgttttctaatgatgtatgctcaagaaaagggcatatattacattcagcttgaagatgatattattgtcaaacaaaattattttaataccataaaaaattttgcacttcaactttcttctgaggaatggatgattctagagttttcccagctgggcttcattggtaaaatgtttcaagcgccggatcttactctgattgtagaattcatattcatgttttacaaggagaaacccattgattggctcctggaccatattctctgggtgaaagtctgcaaccctgaaaaagatgcaaaacattgtgatagacagaaagcaaatctgcgaattcgcttcagaccttcccttttccaacatgttggtctgcactcatcactatcaggaaaaatccaaaaactcacggataaagattatatgaaaccattacttcttaaaatccatgtaaacccacctgcggaggtatctacttccttgaaggtctaccaagggcatacgctggagaaaacttacatgggagaggatttcttctgggctatcacaccgatagctggagactacatcttgtttaaatttgataaaccagtcaatgtagaaagttatttgttccatagcggcaaccaagaacatcctggagatattctgctaaacacaactgtggaagttttgccttttaagagtgaaggtttggaaataagcaaagaaaccaaagacaaacgattagaagatggctatttcagaataggaaaatttgagaatggtgttgcagaaggaatggtggatccaagtctcaatcccatttcagcctttcgactttcagttattcagaattctgctgtttgggccattcttaatgagattcatattaaaaaagccaccaactgatcatctgagaaaccaacacattttttcctgtgaatttgttaattaaagatagttaagcatgtatcttttttttatttctacttgaacactacctcttgtgaagtctactgtagataagacgattgtcatttccacttggaaagtgaatctcccataataattgtatttgtttgaaactaagctgtcctcagattttaacttgactcaaacatttttcaattatgacagcctgttaatatgacttgtactattttggtattatactaatacataagagttgtacatattgttacattctttaaatttgagaaaaactaatgttacatacattttatgaagggggtacttttgaggttcacttattttactatt

SEQ ID NO: 158 - DNA, 1749 bp, Homo sapiens
gatttgctctgccagcagctgtcggtgccgcgctcgacaccgagtcctagctaggcgctcacagaatacgcgctccctccctcccccttctctgtcccccgcctctcgctcaccccggcccactccagcggcgactttgagggattccctctctggcggcctctgcagcagcacagccggcctcattcggggcactgcgagtatggatctccaaggaagaggggtccccagcatcgacagacttcgagttctcctgatgttgttccatacaatggctcaaatcatggcagaacaagaagtggaaaatctctcaggcctttccactaaccctgaaaaagatatatttgtggtgcgggaaaatgggacgacgtgtctcatggcagagtttgcagccaaatttattgtaccttatgatgtgtgggccagcaactacgtagatctgatcacagaacaggccgatatcgcattgacccggggagctgaggtgaagggccgctgtggccacagccagtcggagctgcaagtgttctgggtggatcgcgcatatgcactcaaaatgctctttgtaaaggaaagccacaacatgtccaagggacctgaggcgacttggaggctgagcaaagtgcagtttgtctacgactcctcggagaaaacccacttcaaagacgcagtcagtgctgggaagcacacagccaactcgcaccacctctctgccttggtcacccccgctgggaagtcctatgagtgtcaagctcaacaaaccatttcactggcctctagtgatccgcagaagacggtcaccatgatcctgtctgcggtccacatccaaccttttgacattatctcagattttgtcttcagtgaagagcataaatgcccagtggatgagcgggagcaactggaagaaaccttgcccctgattttggggctcatcttgggcctcgtcatcatggtaacactcgcgatttaccacgtccaccacaaaatgactgccaaccaggtgcagatccctcgggacagatcccagtataagcacatgggctagaggccgttaggcaggcaccccctattcctgctcccccaactggatcaggtagaacaacaaaagcacttttccatcttgtacacgagatacaccaacatagctacaatcaaacaggcctgggtatctgaggcttgcttggcttgtgtccatgcttaaacccacggaagggggagactctttcggatttgtagggtgaaatggcaattattctctccatgctggggaggaggggaggagggtctcagacagctttcgtgctcatggtggcttggctttgactctccaaagagcaataaatgccacttggagctgtatctggccccaaagtttagggattgaaaacatgcttctttgaggaggaaacccctttaggttcagaagaatatggggtgctttgctcccttggacacagctggcttatcctatacagttgtcaatgcacacagaatacaacctcatgctccctgcagcaagacccctgaaagtgattcatgcttctggctggcattctgcatgtttagtgattgtcttgggaatgtttcactgctacccgcatccagcgactgcagcaccagaaaacgactaatgtaactatgcagagttgtttggacttcttcctgtgccaggtccaagtcgggggacctgaagaatcaatctgtgtgagtctgtttttcaaaatgaaataaaacacactattctctggc

SEQ ID NO: 159 - DNA, 2818 bp, Homo sapiens
ccctactccgcctctcgggatcctttaagaggcggggcttggctgccagctccgcggcccgggcaaaaggctgggactttactccgggtggcggcgaggacgagtctgtgctccatcagctgccgcacccgccgcctcccgcccccaaaccccatccccgcggttgagccacgatgagcggcagagtcggcgatctgagccccaggcagaaggaggcattggccaagtttcgggagaatgtccaggatgtgctgccggccctgccgaatccagatgactattttctcctgcgttggctccgagccagaagcttcgacctgcagaagtcggaggccatgctccggaagcatgtggagttccgaaagcaaaaggacattgacaacatcattagctggcagcctccagaggtgatccaacagtatctgtcagggggtatgtgtggctatgacctggatggctgcccagtctggtacgacataattggacctctggatgccaagggtctgctgttctcagcctccaaacaggacctgctgaggaccaagatgcgggagtgtgagctgcttctgcaagagtgtgcccaccagaccacaaagttggggaggaaggtggagaccatcaccataatttatgactgcgaggggcttggcctcaagcatctctggaagcctgctgtggaggcctatggagagtttctctgcatgtttgaggaaaattatcccgaaacactgaagcgtctttttgttgttaaagcccccaaactgtttcctgtggcctataacctcatcaaacccttcctgagtgaggacactcgtaagaagatcatggtcctgggagcaaattggaaggaggttttactgaaacatatcagccctgaccaggtgcctgtggagtatgggggcaccatgactgaccctgatggaaaccccaagtgcaaatccaagatcaactacgggggtgacatccccaggaagtattatgtgcgagaccaggtgaaacagcagtatgaacacagcgtgcagatttcccgtggctcctcccaccaagtggagtatgagatcctcttccctggctgtgtcctcaggtggcagtttatgtcagatggagcggatgttggttttgggattttcctgaagaccaagatgggagagaggcagcgggcaggggagatgacagaggtgctgcccaaccagaggtacaactcccacctggtccctgaagatgggaccctcacctgcagtgatcctggcatctatgtcctgcggtttgacaacacctacagcttcattcatgccaagaaggtcaatttcactgtggaggtcctgcttccagacaaagcctcagaagagaagatgaaacagctgggggcaggcaccccgaaataacaccttctcctatagcaggcctggccccctcagtgtctccctgtcaatttctaccccttgtagcagtcattttcgcacaaccctgaagcccaaagaaactgggctggaggacagacctcaggagctttcatttcagttaggcagaggaagagcgactgcagtgggtctccgtgtctatcaaatacctaaggagtccccaggagctggctggccatcgtgataggatctgtctgtcctgtaaactgtgccaacttcacctgtccagggacagcgaagctgggggtggcggggggcatgtaccacagggtggcagcagggaaaaaaattagaaaagggtgaaagattgggacttaacacttcagggaagtcagctgccggggagaaacttgctcctaaatgaacacataagtttagatcgcaatgaggagtagcagggtagctggttgctagagttacggtggggatcagaaactcttccaaacattttagcactgaggctggggtagcttttggcttttcccaggtctcaggaggtggcctgagtcagcacacatcttcccactcggtagacaggctggcctctccctcactttgagactttggcaactcctgggccacacggcctgcctctttgattactaatgattgtcagtgactcagagcttcctgggacttcgggtacccacccgctgttctccatgcaaacaaagcgccagggaaatgacccacagggatcgcagctgcagggagggccagggaggttgggggtgggagtgaatgctaaaagcagatcgtccagtgcccttttcagtgctaccggcctctcaccaagcagtcctccatgtgagcaaccccgagacaaaaatgctaagtgggatcaagagagcagcactcggagagggtgtttgccagtctgagtgtcccgcggtgcccgccaacccgcttcctgactgacctgagcaaggtcttactaagcagtcccatctctgtgggaggcatgcaacgcgtgcagggagttcaggtgccggtcggcgtagccaggcctggaggccccccaggcaggaggccgcccaaaggcggggccggcgtctcgcagactaggggctgggggcggccacagacggcctcgaaaccacagcccttaccccaatcccacgagccccgccaacgaaccacaggtgctgggctttagagaacatgggaaggcggccccagacctggcgggaacgcctttccctcagagccaggccccggccccgtctgggaagctcatcttgcgaagctgagggagctcagggcaaaggccaggctagcgcggaccggaaggggccgaggctgcacgggcctctgccagaacgctcaggacatcccggcctgggtttacaacgctgttaggaaaattaaccaatgaataaagcaacgttcagtgcgca

SEQ ID NO: 160 - DNA, 1635 bp, Homo sapiens
gggggtggcggggacgcgagtggcggccgcggggccccggacaagggtccgcagagctgcagccttcgagggccagccctctccgagtccggggctgggtcccaccagtgacaaggcggcagccccgcgcacaccaaagagaaagcggctgtggcggcagcggcagccccagccatgctgtgttatgtgacgaggccggacgcggtgctgatggaggtggaggtggaggcgaaagccaacggcgaggactgcctcaaccaggtgtgcaggcgactgggaatcatagaagttgactattttggactgcaatttacgggtagcaaaggtgaaagtttatggctaaacctgagaaaccggatctcccagcagatggatgggctagccccttacaggcttaaacttagagtcaagttcttcgtggagcctcatctcatcttacaggagcagactaggcatatctttttcttgcacatcaaggaggccctcttggcaggccacctcttgtgttccccagagcaggcagtggaactcagtgccctcctggcccagaccaagtttggagactacaaccagaacactgccaagtataactatgaggagctctgtgccaaggagctctcctctgccaccttgaacagcattgttgcaaaacataaggagttggaggggaccagccaggcttcagctgaataccaagttttgcagattgtgtcggcaatggaaaactatggcatagaatggcattctgtgcgggatagcgaagggcagagactgctcattggggttggacctgaaggaatctcaatttgtaaagatgactttagcccaattaataggatagcttatcctgtggtgcagatggccacccagtcaggaaagaatgtatatttgacggtcaccaaggaatctgggaacagcatcgtgctcttgtttaaaatgatcagcaccagggcggccagcgggctctaccgagcgataacagagacgcacgcattctacaggtgtgacacagtgaccagcgccgtgatgatgcagtatagccgtgacttgaagggccacttggcatctctgtttctgaatgaaaacattaaccttggcaagaaatatgtctttgatattaaaagaacatcaaaggaggtgtatgaccatgccaggagggctctgtacaatgctggcgttgtggacctcgtttcaagaagcaaccagagcccttcacactcgcctctgaagtcctcagaaagcagcatgaactgcagcagctgcgagggcctcagctgccagcagacccgggtgctgcaggagaagctacgcaagctgaaggaagccatgctgtgcatggtgtgctgcgaggaggagatcaactccaccttctgtccctgtggccacactgtgtgctgtgagagctgcgccgcccagctacagtcatgtcccgtctgcaggtcgcgtgtggagcatgtccagcacgtctatctgccaacgcacaccagtcttctcaatctgactgtaatctaatctgttgtgcttttgttggacttggcatgtttccatgaactgcactattataaactattaaaatgatagatgttggagaaagtaattattccaacacccatctgcccatgcgatgttaaaaaa

SEQ ID NO: 161 - DNA, 2336 bp, Homo sapiens
ggcacgaggaagaatcaggagcttaggatgtattaacaccaactcattaatatactaaccggacaatgttctacaaacaattctacattgtaaaggactggattggcacaaaataaaataattttattttattcagcttataatatgactcgatggaggaaaatttgataagcatgagagaagaccattcttttcatgttcgttacagaatggaagcttcttgcctagagctggccttggaaggggaacgtctatgtaaatcaggagactgccgcgctggcgtgtcattctttgaagctgcagttcaagttggaactgaagacctaaaaacacttagcgctatttacagccagttgggcaatgcttatttctatttgcatgattatgccaaagcattagaatatcaccatcatgatttaacccttgcaaggactattggagaccagctgggggaagcgaaagctagtggtaatctgggaaacaccttaaaagttcttgggaattttgacgaagccatagtttgttgtcagcgacacctagatatttccagagagcttaatgacaaggtgggagaagcaagagcactttacaatcttgggaatgtgtatcatgccaaagggaaaagttttggttgccctggtccccaggatgtaggagaatttccagaagaagtgagagatgctctgcaggcagccgtggatttttatgaggaaaacctatcattagtgactgctttgggtgaccgagcggcacaaggacgtgcctttggaaatcttggaaacacacattacctccttggcaacttcagggatgcagttatagctcatgagcagcgtctccttattgcaaaagaatttggagataaagcagctgaaagaagagcatatagcaaccttggaaatgcatatatatttcttggtgaatttgaaactgcctcggaatactacaagaagacactactgttggcccgacagcttaaagaccgagctgtagaagcacagtcttgttacagtcttggaaatacatatactttacttcaagactatgaaaaggccattgattatcatctgaagcacttagcaattgctcaagagctgaatgatagaattggtgaaggaagagcatgttggagcttaggaaatgcatacacagcactaggaaatcatgatcaagcaatgcattttgctgaaaagcacttggaaatttcaagagaggttggggataaaagtggtgaactaacagcacgacttaatctctcagaccttcaaatggttcttggtctgagctacagcacaaataactccataatgtctgaaaatactgaaattgatagcagtttgaatggtgtactccccaagttgggacgccggcatagtatggaaaatatggaacttatgaagttaacaccagaaaaggtacagaactggaacagtgaaattcttgctaagcaaaaacctcttattgccaaaccttctgcaaagctactctttgtcaacagactgaaggggaaaaaatacaaaacgaattcctccactaaagttctccaagatgccagtaattctattgaccaccgaattccaaattctcagaggaaaatcagtgcagatactattggagatgaagggttctttgacttattaagccgatttcaaagcaataggatggatgatcagagatgttgcttacaagaaaagaactgccatacagcttcaacaacaacttcttccactccccctaaaatgatgctaaaaacatcatctgttcctgtggtatcccccaacacggatgagtttttagatcttcttgccagctcacagagtcgccgtctggatgaccagagggctagtttcagtaatttgccagggcttcgtctaacacaaaacagccagtcggtacttagccacctgatgactaatgacaacaaagaggctgatgaagatttctttgacatccttgtaaaatgtcaaggatccagattagatgatcaaagatgtgctccaccacctgctaccacaaagggtccgacagtaccagatgaagactttttcagccttattttacggtcccagggaaagagaatggatgaacagagagttcttttacaaagagatcaaaacagagacactgactttgggctaaaggactttttgcaaaataatgctttgttggagtttaaaaattcagggaaaaaatcggcagaccattagttactatggatttattttttttcctttcaaacacggtaaggaaacaatctattacttttttccttaaaaggagaatttatagcactgtaatacagcttaaaatatttttagaatgatgtaaatagttaa

SEQ ID NO: 162 - DNA, 3078 bp, Homo sapiens
ctcctcctccgtctcctcctctctctctcatctgctgtggttatggcctgtcgctggagcacaaaagagtctccgcggtggaggtctgcgttgctcttgcttttcctcgctggggtgtacggaaatggtgctcttgcagaacattctgaaaatgtgcatatttcaggagtgtcaactgcttgtggagagactccagagcaaatacgagcaccaagtggcataatcacaagcccaggctggccttctgaatatcctgcaaaaatcaactgtagctggttcataagggcaaacccaggcgaaatcattactataagttttcaggattttgatattcaaggatccagaaggtgcaatttggactggttgacaatagaaacatacaagaatattgaaagttacagagcttgtggttccacaattccacctccgtatatctcttcacaagaccacatctggattaggtttcattcggatgacaacatctctagaaagggtttcagactggcatatttttcagggaaatctgaggaaccaaattgtgcttgtgatcagtttcgttgtggtaatggaaagtgtataccagaagcctggaaatgcaataacatggatgaatgtggagatagttccgatgaagagatctgtgccaaagaagcaaatcctccaactgctgctgcttttcaaccctgtgcttacaaccagttccagtgtttatcccgttttaccaaagtttacacttgcctccccgaatctttaaaatgtgatgggaacattgactgccttgacctaggagatgagatagactgtgatgtgccaacatgtgggcaatggctaaaatatttttatggtacttttaattctcccaattatccagacttttatcctcctggaagcaattgcacctggttaatagacactggtgatcaccgtaaagtcattttacgcttcactgactttaaacttgatggtactggttatggtgattatgtcaaaatatatgatggattagaggagaatccacacaagcttttgcgtgtgttgacagcttttgattctcatgcacctcttacagttgtttcttcttctggacagataagggtacatttttgtgctgataaagtgaatgctgcaaggggatttaatgctacttaccaagtagatgggttctgtttgccatgggaaataccctgtggaggtaactgggggtgttatactgagcagcagcgttgtgatgggtattggcattgcccaaatggaagggatgaaaccaattgtaccatgtgccagaaggaagaatttccatgttcccgaaatggtgtctgttatcctcgttctgatcgctgcaactaccagaatcattgcccaaatggctcagatgaaaaaaactgctttttttgccaaccaggaaatttccattgtaaaaacaatcgttgtgtgtttgaaagttgggtgtgtgattctcaagatgactgtggtgatggcagcgatgaagaaaattgcccagtaatcgtgcctacaagagtcatcactgctgccgtcatagggagcctcatctgtggcctgttactcgtcatagcattgggatgtacttgtaagctttattctctgagaatgtttgaaagaagatcatttgaaacacagttgtcaagagtggaagcagaattgttaagaagagaagctcctccctcgtatggacaattgattgctcagggtttaattccaccagttgaagattttcctgtttgttcacctaatcaggcttctgttttggaaaatctgaggctagcggtacgatctcagcttggatttacttcagtcaggcttcctatggcaggcagatcaagcaacatttggaaccgtatttttaattttgcaagatcacgtcattctgggtcattggctttggtctcagcagatggagatgaggttgtccctagtcagagtaccagtagagaacctgagagaaatcatactcacagaagtttgttttccgtggagtctgatgatacagacacagaaaatgagagaagagatatggcaggagcatctggtggggttgcagctcctttgcctcaaaaagtccctcccacaacggcagtggaagcgacagtaggagcatgtgcaagttcctcaactcagagtacccgaggtggtcatgcagataatggaagggatgtgacaagtgtggaacccccaagtgtgagtccagcacgtcaccagcttacaagtgcactcagtcgtatgactcaggggctacgctgggtacgttttacattaggacgatcaagttccctaagtcagaaccagagtcctttgagacaacttgataatggggtaagtggaagagaagatgatgatgatgttgaaatgctaattccaatttctgatggatcttcagactttgatgtgaatgactgctccagacctcttcttgatcttgcctcagatcaaggacaagggcttagacaaccatataatgcaacaaatcctggagtaaggccaagtaatcgagatggcccctgtgagcgctgtggtattgtccacactgcccagataccagacacttgcttagaagtaacactgaaaaacgaaacgagtgatgatgaggctttgttactttgttaggtacgaatcacataagggagattgtatacaagttggagcaatatccatttattattttgtaactttacagttaaactagttttagtttaaaaagaaaaaatgcagggtgatttcttattattatatgttagcctgcatggttaaattcgacaacttgtaactctatgaacttagagtttactattttagcagctaaaaatgcatcacatattgcatattgttcaataatggtcctttcatttgtttctgattgttttcatcctgatactgtagttcactgtagaaatgtggctgctgaaactcatttgattgtcatttttatctatcctatgttaaatggtttgtttttacaaaataataccttattttaattgaaacgtttatgcttttgccaagcacatcttgtaacttaatatagctagatgttaaggttgttaatgtaccaaaaaaaaaaaa

SEQ ID NO: 163 - DNA, 839 bp, Homo sapiens
tactaggagaaggacgtacggtcctgctagtagaggaatatgtcgagtttctctagggcgccccagcaatgggccacttttgctagaatatggtatctcttagatgggaaaatgcagccacctggcaaacttgctgctatggcatctataagacttcagggattacataaacctgtgtaccatgcactgagtgactgtggggatcatgttgttataatgaacacaagacacattgcattttctggaaacaaatgggaacaaaaagtatactcttcgcatactggctacccaggtggatttagacaagtaacagctgctcagcttcacctgagggatccagtggcaattgtaaaactagctatttatggcatgctgccaaaaaaccttcacagaagaacaatgatggaaaggttgcatctttttccagatgagtatattccagaagatattcttaagaatttagtagaggagcttcctcaaccacgaaaaatacctaaacgtctagatgagtacacacaagaagaaatagacgccttcccaagattgtggactccacctgaagattatcggctataagagaataagaattgcagaaaataacagtgaagtgattgaaactttcttctgatgagtttctctaacctacaggatggagtaaaacaactgctacagttcagcacctgttttatgtgccgaatcactgtggggaaaggtcaggaaggtatagtccttcaataggaaattgtaattaaaatataattttatagaaccatttttatgtaatctgatttgaatgttatagttgataataataaaatcacttacttggttgactaaaa

SEQ ID NO: 164 - DNA, 1934 bp, Homo sapiens
ctgtcattcatgctttggaaaagtttactgtatatacattagacattcctgttctttttggagttagtactacatcccctgaagaaacatgtgcccaggtgattcgtgaagctaagagaacagcaccaagtatagtgtatgttcctcatatccacgtgtggtgggaaatagttggaccgacacttaaagccacatttaccacattattacagaatattccttcatttgctccagttttactacttgcaacttctgacaaaccccattccgctttgccagaagaggtgcaagaattgtttatccgtgattatggagagatttttaatgtccagttaccggataaagaagaacggacaaaattttttgaagatttaattctaaaacaagctgctaagcctcctatatcaaaaaagaaagcagttttgcaggctttggaggtactcccagtagcaccaccacctgagccaagatcactgacagcagaagaagtgaaacgactagaagaacaagaagaagatacatttagagaactgaggattttcttaagaaatgttacacataggcttgctattgacaagcgattccgagtgtttactaagcctgttgaccctgatgaggttcctgattatgtcactgtaataaagcaaccaatggacctttcatctgtaatcagtaaaattgatctacacaagtatctgactgtgaaagactatttgagagatattgatctaatctgtagtaatgccttagaatacaatccagatagagatcctggagatcgtcttattaggcatagagcctgtgctttaagagatactgcctatgccataattaaagaagaacttgatgaagactttgagcagctctgtgaagaaattcaggaatctagaaagaaaagaggttgtagctcctccaaatatgccccgtcttactaccatgtgatgccaaagcaaaattccactcttgttggtgataaaagatcagacccagagcagaatgaaaagctaaagacaccgagtactcctgtggcttgcagcactcctgctcagttgaagaggaaaattcgcaaaaagtcaaactggtacttaggcaccataaaaaagcgaaggaagatttcacaggcaaaggatgatagccagaatgccatagatcacaaaattgagagtgatacagaggaaactcaagacacaagtgtagatcataatgagaccggaaacacaggagagtcttcggtggaagaaaatgaaaaacagcaaaatgcctctgaaagcaaactggaattgagaaataattcaaatacttgtaatatagagaatgagcttgaagactctaggaagactacagcatgtacagaattgagagacaagattgcttgtaatggagatgcttctagctctcagataatacatatttctgatgaaaatgaaggaaaagaaatgtgtgttctgcgaatgactcgagctagacgttcccaggtagaacagcagcagctcatcactgttgaaaaggctttggcaattctttctcagcctacaccctcacttgttgtggatcatgagcgattaaaaaatcttttgaagactgttgttaaaaaaagtcaaaactacaacatatttcagttggaaaatttgtatgcagtaatcagccaatgtatttatcggcatcgcaaggaccatgataaaacatcacttattcagaaaatggagcaagaggtagaaaacttcagttgttccagatgatgatgtcatggtatcgagtattctttatattcagttcctatttaagtcatttttgtcatgtccgcctaattgatgtagtatgaaaccctgcatctttaaggaaaagattaaaatagtaaaataaaagtatttaaactttcctgatatttatgtacatattaagataaatgtcatgtgtaagataactgataaata

SEQ ID NO: 165 - DNA, 1635 bp, Homo sapiens
ggcacgagcgcggcgttcacgggaattgttcgctttagtgccggcgccatggggtcggagctgatcgggcgcctagccccgcgcctgggcctcgccgagcccgacatgctgaggaaagcagaggagtacttgcgcctgtcccgggtgaagtgtgtcggcctctccgcacgcaccacggagaccagcagtgcagtcatgtgcctggaccttgcagcttcctggatgaagtgccccttggacagggcttatttaattaaactttctggtttgaacaaggagacatatcagagctgtcttaaatcttttgagtgtttactgggcctgaattcaaatattggaataagagacctagctgtacagtttagctgtatagaagcagtgaacatggcttcaaagatactaaaaagctatgagtccagtcttccccagacacagcaagtggatcttgacttatccaggccacttttcacttctgctgcactgctttcagcatgcaagattctaaagctgaaagtggataaaaacaaaatggtagccacatccggtgtaaaaaaagctatatttgatcgactgtgtaaacaactagagaagattggacagcaggtcgacagagaacctggagatgtagctactccaccacggaagagaaagaagatagtggttgaagccccagcaaaggaaatggagaaggtagaggagatgccacataaaccacagaaagatgaagatctgacacaggattatgaagaatggaaaagaaaaattttggaaaatgctgccagtgctcaaaaggctacagcagagtgatttcagcttccaaactggtatacattccaaactgatagtacattgccatctccaggaagacttgacggctttgggattttgtttaaacttttataataaggatcctaagactgttgcctttaaatagcaaagcagcctacctggaggctaagtctgggcagtgggctggcccctggtgtgagcattagaccagccacagtgcctgattggtatagccttatgtgctttcctacaaaatggaattggaggccgggcgcagtggctcacgcctgtaatcccagcactttgggaggccaaggtgggtggatcacctgaggtcaggagctcgagaccagcctggccaacatggtgaaaccccatctctactaaaaatacaaaaattagccaggtgtgatggtgcatgcctgtaatcccagctcctcagtaggctgagacaggagcatcacttgaacgtgggaggcagaggttgcagtgagccgagattgcaccaccgcactccagcctgggtgacagagcgagacttatctcataaataaatagatagatactccagcctgggtgacagagcgagacttatagatagatagatagatagatggatagatagatagatagatagatagatagataaacggaattggagccattttgctttaagtgaatggcagtcccttgtcttattcagaatataaaattcagtctgaatggcatcttacagattttacttcaatttttgtgtacggtattttttatttgactaaatcaatatattgtacagcctaagttaataaatgttatttatatatgcaaaaaaaaaaaaaaaaaaaa

SEQ ID NO: 166 - DNA, 11490 bp, Homo sapiens
atgaatacattctggcctggcagagaattgattgttcaatggtatccatttgatgaaaacagaaatcacccatctgtttcatggcttaagatggtttggaaaaatctttatatacatttttcagaggatttgactttatttgatgagatgccacttatccccagaactatactagaggaaggtcagacatgtgtggaactcattagactcaggattccatcgttagtcattttagacgatgaatctgaagcacagcttccagaatttttagcagacattgtacaaaaacttggagggtttgtccttaaaaaattagatgcatctatacaacatccgcttattaaaaaatatattcattcaccattaccaagtgctgttttgcagataatggagaagatgccattgcagaaattgtgtaatcaaataacttcgctacttccaacacacaaagatgccctgaggaagttcttggctagtttaaccgatagcagtgagaaagagaaaagaattattcaagaattggcaatattcaagcgcattaaccattcttctgatcagggaatttcctcttatacaaaattgaaaggttgtaaagtcttacaccatactgccaaactcccagcagatctgcgactttctatttcagtaatagacagtagtgatgaagctactattcgtctggcaaacatgttgaaaatagaacagttaaagaccactagctgcttaaagcttgttttaaaagatattgaaaatgcattttattcacatgaagaggtaacacagcttatgttatgggtccttgagaatctatcttctcttaaaaatgagaatccaaatgtgcttgagtggttaacaccattaaaattcatccagatatcacaggaacagatggtatcagctggtgaactctttgaccctgatatagaagtactaaaggatctcttttgtaatgaagaaggaacctatttcccaccctcagtttttacctcaccagatattcttcactccttaagacagattggtttaaaaaacgaagccagtctcaaagaaaaggatgttgtgcaagtggcaaaaaaaattgaagccttacaggtcggtgcttgtcctgatcaagatgttcttctgaagaaagccaaaaccctcttactggttttaaataagaatcacacactgttgcaatcatctgaaggaaagatgacattgaagaaaataaaatgggttccagcctgcaaggaaaggcctccaaattatccaggctctttggtctggaaaggagatctctgtaatctctgtgcaccaccagatatgtgtgatgtaggccatgcaattctcattggctcctcacttcctcttgttgaaagtatccatgtaaacctggaaaaagcattagggatcttcacaaaacctagccttagtgctgtcttaaaacactttaaaattgttgttgattggtattcttcaaaaacctttagtgatgaagactactatcaattccagcatattttgcttgagatttacggattcatgcatgatcatctaaatgaagggaaagattcttttagagccttaaaatttccatgggtttggactggcaaaaagttttgtccacttgcccaggctgtgattaaaccaatccatgatcttgaccttcagccttatttgcataatgtacctaaaaccatggcaaaattccaccaactatttaaggtctgtggttcaatagaggagttgacatcagatcatatttccatggttattcagaagatatatctcaaaagtgaccaagatctcagtgaacaagaaagcaaacaaaatcttcatcttatgttgaatattatcagatggctgtatagcaatcagattccagcaagccccaacacaccagttcctatacatcatagcaaaaatccttctaaacttatcatgaagccaattcacgaatgctgttattgtgacattaaagttgatgaccttaatgacttacttgaagattctgtggaaccaatcattttggtgcatgaggacatacccatgaaaactgcagaatggctaaaagttccatgccttagtacaagactgataaatcctgaaaacatgggatttgagcagtcaggacaaagagagccacttactgtaagaattaaaaatattctggaagaatacccttcagtgtcagatatttttaaagaactacttcaaaacgctgatgatgcaaatgcaacagaatgcagtttcttgattgatatgagaagaaatatggacataagagagaatctcctagacccagggatggcagcttgtcatggacctgctttgtggtcattcaacaattctcaattctcagattcagattttgtgaacataactaggttaggagaatctttaaaaaggggagaagttgacaaagttggaaaatttggtcttggatttaattctgtgtaccatatcactgacattcccatcattatgagtcgggaattcatgataatgttcgatccaaacataaatcatatcagtaaacacattaaagacaaatccaatcctgggatcaaaattaattggagtaaacaacagaaaagacttagaaaatttcctaatcagttcaaaccatttatagatgtatttggctgtcagttacctttgactgtagaagcaccttacagctataatggaacccttttccgactgtcctttagaactcaacaggaagcaaaagtgagtgaagttagtagtacgtgctacaatacagcagatatttattctcttgtggatgaatttagtctctgtggacacaggcttatcattttcactcagagtgtaaagtcaatgtatttgaagtacttgaaaattgaggaaaccaaccccagtttagcacaagatacagtaataattaaaaaaaaatcctgctcttccaaagcattgaacacacctgtcttaagtgttttaaaagaggctgctaagctcatgaagacttgcagcagcagtaataaaaagcttcccagtgatgaaccaaagtcatcttgcattcttcagatcacagtggaagaatttcaccatgtgttcagaaggattgctgatttacagtcgccactttttagaggtccagatgatgacccagctgctctctttgaaatggctaagtctggccaatcaaaaaagccatcagatgagttgtcacagaaaacagtagagtgtaccacgtggcttctgtgtacttgcatggacacaggagaggctctgaagttttccctgagtgagagtggaagaagactaggactggttccatgtggggcagtaggagttcagctgtcagaaatccaggaccagaagtggacagtgaaaccacacattggagaggtgttttgctatttacctttacgaataaaaacaggcttgccagttcatatcaatgggtgctttgctgttacatcaaataggaaagaaatctggaaaacagatacaaaaggacgatggaataccacgttcatgagacatgttattgtgaaagcttacttacaggtactgagtgtcttacgggacctggccactagtggggagctaatggattatacttactatgcagtatggcccgatcctgatttagttcatgatgatttttctgtaatttgccaaggattttatgaagatatagctcatggaaaagggaaagaactgaccaaagtcttctctgatggatctacttgggtttccatgaagaacgtaagatttctagatgactctatacttaaaagaagagatgttggttcagcagccttcaagatatttttgaaatacctcaagaagactgggtccaaaaacctttgtgctgttgaacttccttcttcggtaaaattaggatttgaagaagctggctgcaaacagatactacttgaaaacacattttcagagaaacagtttttttctgaagtgttttttccaaatattcaagaaattgaagcagaacttagagatcctttaatgatctttgttctaaatgaaaaagttgatgagttctcgggagttcttcgtgttactccatgtattccttgttccttggaggggcatcctttggttttgccatcaagattgatccaccccgaaggacgagttgcaaagttatttgatattaaagatgggagattcccttatggttctactcaggattatctcaatcctattattttgattaaactagttcagttaggtatggcaaaagatgatattttatgggatgatatgctagaacgtgcagtgtcagtagctgaaattaataaaagtgatcatgttgctgcatgcctaagaagtagtatcttattgagtcttatcgatgagaaactaaaaataagggatcctagagcaaaggattttgctgcaaaatatcaaacaatccgcttccttccatttctgacaaaaccagcaggtttttctttggactggaaaggcaacagttttaagcctgaaaccatgtttgcagcaactgacctttatacagctgaacatcaagatatagtttgtcttttgcaaccaattctaaatgaaaattcccattcttttagaggttgtggttcagtgtcattggctgttaaagagtttttgggattactcaagaagccaacagttgatctggttataaaccaattgaaagaagtagcaaaatcagttgatgatggaattacactgtaccaggagaatatcaccaatgcttgctacaaataccttcatgaagccttgatgcaaaatgaaatcactaagatgtcaattattgataagttaaaaccctttagcttcattctagttgagaatgcatatgttgactcagaaaaggtttcttttcatttaaattttgaggcggcaccatacctttatcagttgcctaataagtataaaaataatttccgcgaactttttgaaaccgtgggtgtgaggcagtcatgcactgttgaagattttgctcttgttttggaatctattgatcaagaaagaggaacaaagcaaataacagaagagaattttcagctttgccgacgaataatcagtgaaggaatatggagtctcattagagaaaagaaacaagaattttgtgagaaaaattatggcaagatattattgccagatactaatcttatgcttctccctgctaaatcgttatgctacaatgattgcccttggataaaagtaaaggataccactgtaaaatattgtcatgctgacatacccagggaagtagcagtaaaactaggagcagtcccaaagcgacacaaagccttagaaagatatgcatccaatgtctgttttacaacacttggcacagaatttgggcagaaagaaaaattgaccagcagaattaagagcatccttaatgcatatccttctgaaaaggaaatgttgaaagagcttcttcaaaatgctgatgatgcaaaggcgacagaaatctgttttgtgtttgatcctagacagcatccagttgatagaatatttgatgataagtgggccccattgcaagggccagcactttgtgtgtacaacaaccagccatttacagaagatgatgttagaggaattcagaatcttggaaaaggcacgaaagagggaaatccttataaaactggacagtatggaataggattcaattctgtgtatcatatcacagactgcccatcttttatttctggcaatgacatcctgtgtatttttgatcctcatgccagatatgcaccaggggccacatccattagtcccggacgcatgtttagagatttggatgcagattttaggacacagttctcagatgttctggatctttatctgggaacccattttaaactggataattgcacaatgttcagatttcctcttcgtaatgcagaaatggcaaaagtttcggaaatttcgtctgttccagcatcagacagaatggtccagaatcttttggacaaactgcgctcagatggggcagaacttctaatgtttcttaatcacatggaaaaaatttctatttgtgaaatagataagagtactggagctctaaatgtgctgtattcagtaaagggcaaaatcacagatggagacagattgaaaaggaaacaatttcatgcatctgtaattgatagtgttactaaaaagaggcagctcaaagacataccagttcaacaaataacctatactatggatactgaggactctgaaggaaatcttactacgtggctaatttgtaatagatcaggcttttcaagtatggagaaagtatctaaaagtgtcatatcagctcacaagaaccaagatattactcttttcccacgtggtggagtagctgcctgcattactcacaactataaaaaaccccatagggccttctgttttttgcctctttctttggagactgggctgccatttcatgtgaatggccactttgcactggattcagccagaaggaacctgtggcgtgatgataatggagttggtgttcgaagtgactggaataacagtttaatgacagcattaatagctcctgcatatgttgaattgctaatacagttaaaaaaacggtatttccctggttctgatccaacattatcagtgttacagaacacccctattcatgttgtaaaggacactttaaagaagtttttatcgtttttcccagttaaccgtcttgatctacagccagatttatattgtctagtgaaagcactttacaattgcattcacgaagacatgaaacgtcttttacctgttgtgcgggctccaaatattgatggctctgacttgcactctgcagttataattacttggatcaatatgtctacttctaataaaactagaccattttttgacaatttactacaggatgaattacaacaccttaaaaatgcagattataatatcaccacacgcaaaacagtagcagagaatgtctataggctgaaacatctccttttagaaattggtttcaacttggtttataactgtgatgaaactgctaatctttaccactgtcttatagatgcagatattcctgttagttatgtgacccctgctgatatcagatcttttttaatgacattttcctctcctgacactaattgccatattgggaagctgccttgtcgtctgcagcagactaatctaaaactttttcatagtttaaaacttttagttgattattgttttaaagatgcagaagaaaatgagattgaagttgagggattgccccttctcatcacactggacagtgttttgcaaacttttgatgcaaaacgacccaagtttctaacaacatatcatgaattgattccatcccgcaaagacttgtttatgaatacattatatttgaaatatagtaatattttattgaactgtaaagttgcaaaagtgtttgacatttccagctttgctgatttgttatcctctgtgttgcctcgagaatataagaccaaaagttgcacaaagtggaaagacaattttgcaagtgagtcttggcttaagaatgcatggcattttattagtgaatctgtaagtgtgaaagaagatcaggaagaaacaaaaccaacatttgacattgttgttgatactctaaaagactgggcattgcttccaggaacaaagtttactgtttcagccaaccagcttgtggttcctgaaggagatgttctgcttcctctcagccttatgcacattgcagtttttccaaatgcccagagtgataaagtttttcatgctctaatgaaagccggctgtattcagcttgctttgaacaaaatctgttccaaagacagtgcatttgttcctttgttgtcatgtcacacagcaaatatagagagccccacaagcatcttgaaggctctacattatatggtccaaacttcaacatttagagcagaaaaattagtagaaaatgattttgaggcacttttgatgtatttcaactgcaatttgaatcatttgatgtcccaagatgatataaaaattctaaagtcacttccgtgctataaatccatcagtggccgctatgtaagcattggaaaatttggaacatgctacgtacttacaaaaagtatcccttcagctgaagtggagaaatggacacaatcatcatcatctgcatttcttgaagaaaaaatacacttaaaagaactatatgaggtgattggttgtgtacctgtagatgatcttgaggtatatttgaaacacctcttaccaaaaattgaaaatctctcttatgatgcaaaattagagcacttgatctaccttaagaatagattatcaagtgctgaggaattatcagagattaaggaacaactttttgaaaaactggaaagtttattgataatccatgatgctaacagtagactaaagcaagcaaagcatttctatgatagaactgtgagagtttttgaagttatgcttcctgaaaaattgtttattcctaatgatttctttaagaaattggaacaacttataaaacccaaaaatcatgttacatttatgacatcctgggtggaattcttaagaaatattggactaaaatacatactttctcagcagcagttgttacagtttgctaaggaaatcagtgtgagggctaatacagaaaactggtccaaagaaacattgcaaaatacagttgatatccttctgcatcatatattccaagaacgaatggatttgttatctggaaattttctgaaagaactatctttaataccattcttatgtcctgagcgggcccccgcggaattcattagatttcatcctcaatatcaagaggtaaatggaacacttcctcttataaagttcaatggagcacaggtaaatccaaaattcaagcaatgtgatgtactccagctgttatggacatcctgccctattcttccagagaaagctacacccttaagcattaaagaacaagaaggtagtgaccttggtccacaagaacagcttgaacaagttttaaatatgcttaatgttaacctggatcctcctcttgataaggtaatcaataactgcagaaacatatgcaacataacgacgttggatgaagaaatggtaaaaactagagcaaaagtcttaaggagcatatatgaattcctcagtgcagaaaaaagggaatttcgttttcagttgcgaggggttgcttttgtgatggtagaagatggttggaaacttctgaagcctgaggaggtagtcataaacctagaatatgaatctgattttaaaccttatttgtacaagctacctttagaacttggcacatttcaccagttgttcaaacacttaggtactgaagatattatttcaactaagcaatatgttgaagtgttgagccgcatatttaaaaattctgagggcaaacaattagatcctaatgaaatgcgtacagttaagagagtagtttctggtctgttcaggagtctacagaatgattcagtcaaggtgaggagtgatctcgagaatgtacgagaccttgcgctttacctcccaagccaggatggtagattggtaaagtcaagcatcttagtgtttgacgatgcgccacattataaaagtagaatccaggggaatattggtgtgcaaatgttagttgatctcagccagtgctacttagggaaagaccatggatttcacactaagttgataatgctctttcctcaaaaacttagacctcgattattgagcagtatacttgaagaacaattagatgaagagactcccaaagtttgtcagtttggagcgttgtgttctcttcaaggaagattgcagttactcttgtcttctgaacagttcattacaggactgattagaattatgaagcatgaaaatgataatgcttttctggccaatgaagaaaaagccataagactttgcaaagccctaagagaaggattgaaagtatcctgctttgaaaagcttcaaacaacattaagagttaaaggttttaatcctattccccacagcagaagtgaaacttttgcttttttgaagcgatttggtaatgcagtcatcttgctctacattcaacattcagacagtaaagacattaatttcctgttagcactggcaatgactcttaaatcagcaactgacaatttgatttctgacacttcatatttaattgctatgctaggatgcaatgatatttacaggattggtgagaaacttgacagtttaggagtgaaatatgactcttcggagccatcaaaactggaacttccaatgcctggcacaccaattcctgctgaaattcattacactctgcttatggacccaatgaatgttttttacccgggagaatatgttgggtaccttgttgatgctgaaggtggtgatatctatggatcataccagccaacatacacatatgcaattattgtacaagaagttgaaagagaagatgctgacaattctagttttctaggaaagatatatcagatagatattggttatagtgaatataaaatagttagctctcttgatctgtataagttttcaagacctgaggaaagctctcaaagcagggacagtgctccttctacaccaaccagccccactgagttcctcacccctggcctgagaagcattcctcctcttttctctggtagagagagccacaagacttcttccaaacatcagtcccccaaaaagcttaaggttaattctttaccagaaatcttaaaagaagtgacatctgtggtggagcaagcatggaagcttccagaatcggaacgaaaaaagattattaggcggttgtatttgaaatggcatcctgacaaaaatccagagaaccatgacattgccaatgaagtttttaaacatttgcagaatgaaatcaacagattagaaaaacaggcttttctagatcaaaatgcagacagggcctccagacgaacattttcaacctcagcatcccgatttcagtcagacaaatactcatttcagagattctatacttcatggaatcaagaagcaacgagccataaatctgaaagacagcaacagaacaaagaaaaatgccccccttcagccggacagacttactctcaaaggttctttgttcctcccactttcaagtcggttggcaatccagtggaagcacgcagatggctaagacaagccagagcaaacttctcagctgccaggaatgaccttcataaaaatgccaatgagtgggtgtgctttaaatgttacctttctaccaagttagctttgattgcagctgactatgctgtgaggggaaagtctgataaagatgtaaaaccaactgcacttgctcagaaaatagaggaatatagtcagcaacttgaaggactgacaaatgatgttcacacattggaagcttatggtgtagacagtttaaaaacaagataccctgatttgcttccctttcctcagatcccaaatgacaggttcacttctgaggttgctatgagggtgatggaatgtactgcctgtatcataataaaacttgaaaattttatgcaacaaaaagtgtga

SEQ ID NO: 167 - DNA, 2640 bp, Homo sapiens
aaatagacactttggtttgaaagatgtaaacattccaaccttggaaggtagaattcttgttgaattagatgagacatctcaagagcttgttccagaaaagaccaatgttaagccaagggcaatgaaaactattctaggtgatcaacgaaaacagatgctccaaaaatacaaagaagaaaagcaacttcaaaaattgaaagagcagagagagaaagctaaacgaggaatatttaaagtgggtcgttatagacctgatatgccttgttttcttttatcaaaccagaatgctgtgaaagctgagccaaaaaaggctattccatcttctgtacggattacaaggtcaaaggccaaagaccaaatggagcagactaagattgataacgagagtgatgttcgagcaatccgacctggtccaagacaaacttctgaaaagaaagtgtcagacaaagagaaaaaagttgtgcagcctgtaatgcccacgtcgttgagaatgactcgatcagctactcaagcagcaaagcaggttcccagaacagtctcatctaccacagcaagaaagccagtcacaagagctgctaatgaaaacgaaccagaaggaaaggtgccaagtaaaggaagacctgccaaaaatgtagaaacaaaacccgacaagggtatttcttgtaaagtcgatagtgaagaaaatactttgaattcacaaactaatgcaacaagtggaatgaatccagatggagtcttatcaaaaatggaaaacttacctgagataaatactgcaaaaataaaagggaagaattccttcgcacctaaggattttatgtttcagccactggatggtctgaagacctatcaagtaacacctatgactcccagaagtgccaatgcttttttgacacccagttacacctggactcctttaaaaacagaagttgatgagtctcaagcaacaaaagaaattttggcacaaaaatgtaaaacttactctaccaagacaatacagcaagattcaaataaattgccatgtcctttgggtcctctaactgtttggcatgaagaacatgttttaaataaaaatgaagctactactaaaaatttaaatggccttccaataaaagaagtcccatcacttgaaagaaatgaaggtcgaattgctcagccccaccatggtgtgccatatttcagaaatatcctccagtcagaaactgagaaattaacttcacattgcttcgagtgggacaggaaacttgaattggacattccagatgatgctaaagatcttattcgcacagcagttggtcaaacaagactccttatgaaggaaaggtttaaacagtttgaaggactggttgatgattgtgaatataaacgaggtataaaggagactacctgtacagatctggatggattttgggatatggttagttttcagatagaagatgtaatccacaaattcaacaatctgatcaaacttgaggaatctgggtggcaagtcaataataatatgaatcataatatgaacaaaaatgtctttaggaaaaaagttgtctcaggtatagcaagtaaaccaaaacaggatgatgctggaagaattgcagcgagaaatcgcctagctgccataaaaaatgcaatgagagagagaattaggcaggaagaatgtgctgaaacagcagtttctgtgataccaaaggaagttgataaaatagtgttcgatgctggatttttcagagttgaaagtcctgttaaattattctcaggactttctgtctcttctgaaggcccttctcaaagacttggaacacctaagtctgtcaacaaagctgtatctcagagtagaaatgagatgggcattccacaacaaactacatcaccagaaaatgccggtcctcagaatacgaaaagtgaacatgtgaagaagactttgtttttgagtattcctgaaagcaggagcagcatagaagatgctcagtgtcctggattaccagatttaattgaagaaaaccatgttgtaaataagacagacttgaaggtggattgtttatccagtgagagaatgagtttgcctcttcttgctggtggagtagcagatgatattaatactaacaaaaaagaaggaatttcagatgttgtggaaggaatggaactgaattcttcaattacatcacaggatgttttgatgagtagccctgaaaaaaatacagcttcacaaaatagcatcttagaagaaggggaaactaaaatttctcagtcagaactatttgataataaaagtctcactactgaatgccaccttcttgattcaccaggtctaaactgcagtaatccatttactcagctggagaggagacatcaagaacatgccagacacatttcttttggtggtaacctgattactttttcacctctacaaccaggagaattttgaatttaaaaataaatccaaacattttccttcatattatcaatgcttatatattccttagactattgaaattttggagaaaatgtatttgtgttcacttctatagcatataatgttttaatattctgtgttcatcaaagtgtattttagatatactctttctcaagggaagtggggatattttgtacattttcaacacagaataaaaaatgtactgtgccttg

SEQ ID NO: 168 - DNA, 2504 bp, Homo sapiens
ctttgccgtccggctattagcctactgtggctagtcacccccggggtcccggccttctcgggctggggccgccgccaccgcggcaggacggggaggcgggccatggcgtcctgcgtggggagccggaccctaagcaaggatgatgtgaactacaaaatgcatttccggatgatcaacgagcagcaagtggaggacatcaccattgacttcttctaccggccgcataccatcaccctgctcagcttcaccatcgtcagcctcatgtacttcgcctttaccagggatgactctgttccagaagacaacatctggagaggcatcctctctgttattttcttctttcttatcatcagtgtgttagctttccccaatggtccgttcactcgacctcatccagccttatggcgaatggtttttggactcagtgtgctctacttcctgttcctggtattcctactcttcctgaatttcgagcaggttaaatctctaatgtattggctagatccaaatcttcgatacgccacaagggaagcagatgtcatggagtatgctgtgaactgccatgtgatcacctgggagaggattatcagccactttgatatttttgcatttggacatttctggggctgggccatgaaggccttgctgatccgtagttacggtctctgctggacaatcagtattacctgggagctgactgagctcttcttcatgcatctcctccccaattttgccgagtgctggtgggatcaagtcattctggacatcctgttgtgcaatggcggtggcatttggctgggcatggtcgtttgccggtttttagagatgaggacttaccactgggcaagcttcaaggacattcataccaccaccgggaagatcaagagagctgttctgcagttcactcctgctagctggacctatgttcgatggtttgaccccaaatcttcttttcagagagtagctggagtgtaccttttcatgatcatctggcagctgactgagttgaataccttcttcttgaagcatatctttgtgttccaagccagtcatccattaagttggggtagaattctctttattggtggcatcacagctcccacagtgagacagtactacgcttacctcaccgacacacagtgcaagcgcgtaggaacacaatgctgggtgtttggggtcattggtttcctggaggccattgtttgcataaaatttggacaagatctcttctctaagacccaaatactctatgttgtgctttggcttctttgcgtggctttcaccactttcctctgtctgtacggcatgatttggtatgcagaacactatggtcaccgagaaaagacctactcggagtgtgaagatggcacctacagtccagagatctcctggcatcacaggaaagggacaaaaggttctgaagacagcccacccaagcatgcaggcaacaacgaaagccattcttccaggagaaggaatcggcattccaagtcaaaagtcaccaatggcgttggaaagaaatgaaaaaccctggttaatcaaagatgttccagagtgcctagaactgagagggaaatggaactcatttggaactccccgtgaggaggtcgaggcgcacagggcaagcaggaagaggcgagggcacttgggggtcattatttgagatcgtaagtcttgtttcccacagacctggccgcgtcaggcagatcatcgcctggggggcctttgccaacgtggggtctcttctaacttcagcacttgacatgcggtcaccggtggcagcgcggtgtgttgaagggaaacggtagctattcattcacagttgccaagagcagctccgcgcctgctggatcgtggatgcagcgtaaacatcttccttcagacgaggcattaaccccatggttaatggactggtcaccagtttttattttatttttatgaatctacctttccattgattgatttaagttcaggccacttttctgtcttttatttggttactgttgttatttgtttttaagttaggatgctttttaacagcctttagaagccgctgctgaaattgatactgggggaagggttccccttccttctagagcagaaaagggagagaagtgttgtattcctgtttggtaacctcagtctcctgtaagacctcctaccacatggcgagtatacaccaatcaggagagggtagctgcctgcataggagcctcgcttccgattattcccttcccaatattattcatccagacttagccacagtgcacaaaagcaaacctgctagagaggcagtgaacaccacagcttctccccagcttggtgccttttacatcgggtttgttctccttccatggtgtgttgctgacattgtcactgagtcccatgtgaggtgctggtgagtattacctttcatctgtgccatgctctagaaccttgaccttgatagttcaccacgtctgatggatccctgttttaaataaaaacgattcactttaaagcct

SEQ ID NO: 169 - DNA, 2470 bp, Homo sapiens
ttggcgggcggaagcggccacaacccggcgatcgaaaagattcttaggaacgccgtaccagccgcgtctctcaggacagcaggcccctgtccttctgtcgggcgccgctcagccgtgccctccgcccctcaggttctttttctaattccaaataaacttgcaagaggactatgaaagattatgatgaacttctcaaatattatgaattacatgaaactattgggacaggtggctttgcaaaggtcaaacttgcctgccatatccttactggagagatggtagctataaaaatcatggataaaaacacactagggagtgatttgccccggatcaaaacggagattgaggccttgaagaacctgagacatcagcatatatgtcaactctaccatgtgctagagacagccaacaaaatattcatggttcttgagtactgccctggaggagagctgtttgactatataatttcccaggatcgcctgtcagaagaggagacccgggttgtcttccgtcagatagtatctgctgttgcttatgtgcacagccagggctatgctcacagggacctcaagccagaaaatttgctgtttgatgaatatcataaattaaagctgattgactttggtctctgtgcaaaacccaagggtaacaaggattaccatctacagacatgctgtgggagtctggcttatgcagcacctgagttaatacaaggcaaatcatatcttggatcagaggcagatgtttggagcatgggcatactgttatatgttcttatgtgtggatttctaccatttgatgatgataatgtaatggctttatacaagaagattatgagaggaaaatatgatgttcccaagtggctctctcccagtagcattctgcttcttcaacaaatgctgcaggtggacccaaagaaacggatttctatgaaaaatctattgaaccatccctggatcatgcaagattacaactatcctgttgagtggcaaagcaagaatccttttattcacctcgatgatgattgcgtaacagaactttctgtacatcacagaaacaacaggcaaacaatggaggatttaatttcactgtggcagtatgatcacctcacggctacctatcttctgcttctagccaagaaggctcggggaaaaccagttcgtttaaggctttcttctttctcctgtggacaagccagtgctaccccattcacagacatcaagtcaaataattggagtctggaagatgtgaccgcaagtgataaaaattatgtggcgggattaatagactatgattggtgtgaagatgatttatcaacaggtgctgctactccccgaacatcacagtttaccaagtactggacagaatcaaatggggtggaatctaaatcattaactccagccttatgcagaacacctgcaaataaattaaagaacaaagaaaatgtatatactcctaagtctgctgtaaagaatgaagagtactttatgtttcctgagccaaagactccagttaataagaaccagcataagagagaaatactcactacgccaaatcgttacactacaccctcaaaagctagaaaccagtgcctgaaagaaactccaattaaaataccagtaaattcaacaggaacagacaagttaatgacaggtgtcattagccctgagaggcggtgccgctcagtggaattggatctcaaccaagcacatatggaggagactccaaaaagaaagggagccaaagtgtttgggagccttgaaagggggttggataaggttatcactgtgctcaccaggagcaaaaggaagggttctgccagagacgggcccagaagactaaagcttcactataatgtgactacaactagattagtgaatccagatcaactgttgaatgaaataatgtctattcttccaaagaagcatgttgactttgtacaaaagggttatacactgaagtgtcaaacacagtcagattttgggaaagtgacaatgcaatttgaattagaagtgtgccagcttcaaaaacccgatgtggtgggtatcaggaggcagcggcttaagggcgatgcctgggtttacaaaagattagtggaagacatcctatctagctgcaaggtataattgatggattcttccatcctgccggatgagtgtgggtgtgatacagcctacataaagactgttatgatcgctttgattttaaagttcattggaactaccaacttgtttctaaagagctatcttaagaccaatatctctttgtttttaaacaaaagatattattttgtgtatgaatctaaatcaagcccatctgtcattatgttactgtcttttttaatcatgtggttttgtatattaataattgttgactttcttagattcacttccatatgtgaatgtaagctcttaactatgtctctttgtaatgtgtaatttctttctgaaataaaaccatttgtgaatat

SEQ ID NO: 170 - DNA, 6586 bp, Homo sapiens
ctggggagccggcgctggaggtggtgagtggcgtggggactgtgtcgagggggtccccaaggtgccggaccctgcggaggggcgaagtttcggcactggggagggcgtgcggacgctttccctacaggcgaccactgctctgcgggcgggtggtcttagctccagtcccccattcagttcctcagcattccaggtcggcggcgaaggggtccccgaacgaagggcgcaaggcagcgtctctgctgggaccgggaagccggacttcagggcctctcggcccgtgggcttctccccgagtctccccgagtcggttggcattaagagtttagcagatactttcagaaatggatacataagaaatggctggaaatcaaatgaatgtccaaagaagagcttagggtcttagtaacattcttttttaaaataactgtctgccaaaatgtcattacacagtactcataatagaaataacagcggtgatattcttgatattccttcttcccaaaatagttcatcactgaatgccctcacccacagtagccgacttaagctgcatttgaagtcggatatgtcagaatgtgaaaatgatgatccattattgagatctgcaggtaaagtcagagacataaatagaacttatgttatttctgccagtagaaaaacagcagacatgccccttacccctaatcctgtaggtagattggcacttcagaggagaactacaaggaacaaagaatcatctttgcttgttagtgagttggaagacacaactgaaaaaacagcagaaacacgtcttacattacaacgtcgtgctaaaacagattctgcagaaaagtggaaaacagctgaaatagattctgtcaaaatgacactgaatgtgggaggtgaaacagaaaataatggtgtttctaaggaaagtagaacaaatgtaaggattgtaaataatgctaaaaactcttttgttgcctcttctgtacctttagatgaagatccacaggtcattgaaatgatggctgataagaaatacaaagaaacattttctgcccccagtagagcaaatgaaaatgttgcacttaagtactcaagtaatagaccacccattgcttccctgagtcagactgaagttgttagatcaggacacttgacaacgaaacctactcagagcaagttggatatcaaagtgttgggaacaggaaacttgtatcatagaagtattgggaaggaaattgcaaaaacttcaaataaatttgggagcttagaaaaaagaacacctacaaaatgtacaacagaacacaaactgacaacaaagtgcagcctgcctcagcttaagagcccagctccatcaatactgaagaatagaatgtctaaccttcaagttaaacaaagaccaaaaagttcctttcttgcaaataaacaggaaagatccgcagaaaatacaattcttcccgaagaagaaactgtagttcagaacacctctgcaggaaaagaccccttaaaagtagagaatagtcaagtgacagtggcagtacgcgtaagacctttcaccaagagagagaagattgaaaaagcatcccaggtagtcttcatgagtgggaaagaaataactgtggaacaccctgacacgaaacaagtttataattttatttatgatgtttcattctggtcttttgatgaatgtcatcctcactacgctagccagacaactgtctatgagaagctagcagcaccactcctagaaagagccttcgaaggcttcaatacctgtctttttgcttatggtcagactggctctggaaaatcatatacgatgatgggatttagtgaagaaccaggaataattccaagattttgtgaagatcttttttctcaagtagccagaaaacaaacccaagaggtcagctatcacattgaaatgagcttctttgaagtatataatgaaaaaattcacgaccttctggtttgtaaagatgaaaatgggcagagaaagcaaccactgagagtgagggaacatcctgtttatggaccatatgttgaagcactgtcaatgaacattgtcagttcttacgctgatatccagagttggctagaattgggaaataaacaaagagctactgctgctactggtatgaatgataaaagttcccgatctcattcagttttcaccctggtgatgacccagaccaagacagaatttgtggaaggggaagaacacgatcacagaataacaagtcgaattaacctaatagatctggcaggcagtgagcgctgctctacggctcacactaatggagatcgactaaaggaaggtgtgagtattaataagtccttgctaactttgggaaaagttatatctgcactttcggaacaagcaaaccaaaggagtgtttttattccttatcgtgaatctgttcttacatggctgttaaaagaaagtctgggtggaaattcaaaaactgcaatgattgctacgattagtcccgctgccagcaacatagaagaaacattaagcacacttagatatgctaaccaagcccgtttaatagtcaacattgctaaagtaaatgaagatatgaacgctaagttaattagagaattgaaggcagaaattgcaaagctaaaagctgctcagagaaacagtcggaatattgaccctgaacgatacaggctctgtcggcaagaaataacatccttaagaatgaaactgcatcaacaggagagagacatggcagaaatgcaaagagtgtggaaagaaaagtttgaacaagctgaaaaaagaaaacttcaagaaacaaaagagttacagaaagcaggaattatgtttcaaatggacaatcatttaccaaaccttgttaatctgaatgaagatccacaactatctgagatgctgctatatatgataaaagaaggaacaactacagttggaaagtataaaccaaactcaagccatgatattcagttatctggggtgctgattgctgatgatcattgtactatcaaaaattttggtgggacagtgagtattatcccagttggggaagcaaagacatatgtaaatggaaaacatattttggaaatcacagtattacgtcatggtgatcgagtgattcttggtggagatcattattttagatttaatcatccagtagaagtccagaaaggaaaaaggccatctggaagagatactcctataagtgagggtccaaaagactttgaatttgcaaaaaatgagttgctcatggcacagagatcacaacttgaagcagaaataaaagaggctcagttgaaggcaaaggaagaaatgatgcaaggaatccagattgcaaaagaaatggctcagcaagagctttcttctcaaaaagctgcatatgaaagcaaaataaaagcactggaagcagaactgagagaagagtctcaaaggaaaaaaatgcaggaaataaataaccagaaggctaatcacaaaattgaggaattagaaaaggcaaagcagcatcttgaacaggaaatatatgtcaacaaaaagcgattagaaatggagacattggctacaaaacaggctttagaagaccatagcatccgccatgcaagaattctggaagctttagaaactgaaaagcaaaaaattgctaaagaagtacaaattctacagcagaatcggaataatagggataaaacttttacagtgcagacaacttggagctctatgaaactctcaatgatgattcaggaagccaatgctatcagcagcaaattgaaaacatactatgtttttggcagacatgatatatcagataaaagtagttctgacacttctattcgggttcgtaacctgaaactaggaatctcaacattctggagtctggaaaagtttgaatctaaacttgcagcaatgaaagaactttatgagagtaatggtagtaacaggggtgaagatgccttttgtgatcctgaagatgaatgggaacccgacattacagatgcaccagtttcttcactttctagaaggaggagtaggagtttgatgaagaacagaagaatttctggttgtttacatgacatacaagtccatccaattaagaatttgcattcttcacattcatcaggtttaatggacaaatcaagcactatttactcaaattcagcagagtcctttcttcctggaatttgcaaagaattgattggttcttcgttagatttttttggacagagttatgatgaagaaagaactatagcagacagcctaattaatagttttcttaaaatttataatgggctatttgccatttccaaggctcatgaagaacaagatgaagaaagtcaagataacttgttttcttctgatcgagcaatccagtcacttactattcagactgcatgtgcttttgagcagctagtagtgctaatgaaacactggctgagtgatttactgccttgtaccaacatagcaagacttgaggatgagttgagacaagaagttaaaaaactgggaggctacttacagttatttttgcagggatgctgtttggatatttcatcaatgataaaagaggctcaaaagaatgcaatccaaattgtacaacaagctgtaaagtatgtggggcagttagcagttctgaaagggagcaagctacattttctagaaaacggtaacaataaagctgccagtgtccaggaggaattcatggatgctgtttgtgatggtgtaggcttaggaatgaagattttattagattctggactggaaaaagcaaaagaacttcagcatgaactctttaggcagtgtacaaaaaatgaggttaccaaagaaatgaaaactaatgccatgggattgattagatctcttgaaaacatctttgctgaatcgaaaattaaaagtttcagaaggcaagtacaagaagaaaactttgaataccaagatttcaagaggatggttaatcgtgctccagaattcttaaagttaaaacattgcttagagaaagctattgaaattattatttctgcactgaaaggatgccatagtgatataaatcttctccagacttgtgttgaaagtattcgcaacttggccagtgatttttacagtgacttcagtgtgccttctacttctgttggcagctatgagagtagagtaactcacattgtccaccaggaactagaatctctagctaagtctctcctcttttgttttgaatctgaagaaagccctgatttgttgaaaccctgggaaacttataatcaaaataccaaagaagaacaccaacaatctaaatcaagcgggattgacggcagtaagaataaaggtgtaccaaagcgtgtctatgagctccatggctcatccccagcagtgagctcagaggaatgcacacccagtaggattcagtgggtgtgaatactgatgtgtaggcacttttatgaccacccatgaaagaaaaagaacacttgctcggtaattttctttatgcaggagagtttaagagaaatcagcacagatatttcaaaaaagtccatgtctttttatctttaaaatatctatttatcaaaggccagacacagtggctcacgcctgtaatcccagcactttgggaggcgggcagatcacaaggtcaggagtttgagaccggcctggccaacatggtgaaaccccgtctctactaaaaatacaaaaatttgctgggcatggtggcgcgtgcctgtaatcccagctactaggggggctgaggcaggaggatcgcttgaacctgagaggcagaggttgcagtgagccaagatcatgccactttactccagtctgagcaacagaacgagacttagtcaaaataaataaataaataagtaaataaataaataaataaaatatcttttatctttaaagtgtttaacattggtatactgtctgtagttggttcattagtcgtttataaagggttattttctcatgagtggaaacctgaacaatcagttacctttgtgcctatgccttctctctcctcagacagctgggatgtttatggtgaaatggcctgtacaagtttaactaagacaacttaacttgcattgttaatcaaaaattcttttctcaaagggttaactggttgccattttgaatagtatgttcaagggtgtagcttcctgtttctttccaaattataagtagctacctaaatatagtataattatatattaataatatggcttgctggcacagtagtttaccctgttatctgtgtttcataatgggggctgtatgaatattatttaaaactaataaaatgttgccagaattatactaaactgttggatgagattaggagatcagaggctggaccttctcttgataatgcttgttttgttaaaggtataatgaaataatttgtatatgatttgatgaagattaaagacccttattttccacagctttaaaaaaaaacctttatttatgatcaagtaataaagataatattctacttgtgggatcttacattatggaaatagtttgacgtttttgacctcaagagtatgtataatttgaagagatactttgtaactatgcttgggtgatattgagcagttcctaaagaataattcattt

SEQ ID NO: 171 - DNA, 3432 bp, Homo sapiens
  misc_feature (2741)..(2741): n is a, c, g, or t
ctcgtcatgcgcaatgtggcgctgcggcgggcggcagggcctgtgtgtgctgaggcggctgagcggcggacatgcacaccacagagcgtggcgatggaacagtaaccgggcttgtgagagggctctgcagtataaactaggagacaagatccatggattcaccgtaaaccaggtgacatctgttcccgagctgttcctgactgcagtgaagctcacccatgatgacacaggagccaggtatttacacctggccagagaagacacgaataatctgttcagcgtgcagttccgtaccactcccatggacagtactggtgttcctcacattcttgagcataccgtcctttgtgggtctcaaaaatatccgtgcagaaaccctttcttcaaaatgttgaaccggtccctctccacgttcatgaacgccttcacagctagtgattatactctgtatccattttccacacaaaatcccaaggactttcagaatctcctctcggtgtatttggatgccaccttttccccatgtttacgcgagctggatttctggcaggaaggatggcggctggaacatgagaatccgagcgacccccagacgcccttggtctttaaaggagtcgtctttaatgagatgaagggagcgtttacagacaatgagaggatattctcccagcaccttcagaacagacttcttcccgaccacacgtactcagtggtctccgggggtgacccactgtgcatcccggagcttacatgggagcagcttaagcagtttcatgccactcactatcacccaagcaatgctaggttcttcacgtacggtaattttccattagaacagcatctgaaacaaattcacgaggaagcactgagcaaattccagaaaattgaaccaagcaccgtggtgccagctcagacaccctgggacaagcctagggaattccagataacatgtggcccggattcatttgctacagatccctctaaacaaacaaccgtcagcgttagcttcctcttaccggacatcaccgacacatttgaagccttcacattaagtcttctgtcttcactcttgacttctgggcccaattctcccttttacaaagccttgattgaatctggccttggcacagaattttctcctgatgttggatataatggctacacgagggaggcctactttagtgtcggcctccaagggattgtggagaaagacattgagaccgtcagaagcctcatagacagaacgattgatgaagtagttgagacaaggattgaagatgatcgaattgaggctttacttcataaaattgaaatacagatgaaacatcagtctaccagctttgggctgatgctgacatcatacatagcttcttgctggaaccatgatggggaccctgtggagctcttgaagttgggaaatcagttagctaaattcagacagtgcctgcaggaaaatccaaaatttttgcaagaaaaagtaaaacagtattttaagaataaccagcataagctgactttatcgatgaggccagatgacaagtatcacgagaagcaggcacaggtggaagccacgaagctcaagcagaaggtcgaggctctgtcccccggagacaggcagcagatctacgagaaaggtctagaattacggagtcaacaaagcaaacctcaagatgcctcttgtctgccagcgttgaaagtttccgatattgaacccaccatacctgtcacagagttggacgtggtcctgacagctggagatatccctgttcagtactgcgcccagcccaccaatggcatggtgtatttccgggccttctccagcctgaacacactccccgaggagctgaggccctatgtgcccctcttctgcagcatcctcaccaagctgggctgcggccttcttgactaccgggagcaggctcagcagatagaattgaagaccggagggatgagtgcttctccccacgtgctccccgacgactcacacatggacacctacgagcaggtaggtgtgcttttctcctctctctgcctggatcgaaacctgccagacatgatgcagctatggagtgaaatatttaacaacccgtgctttgaagaagaggagcacttcaaggtgctggtgaagatgaccgcccaggagctcgccaatggaattcctgactctgggcacctgtacgcatccatcagggcaggccggaccctcacgcccgcaggggacctgcaggagaccttcagcgggatggatcaggtgcggctgatgaagaggattgcagaaatgacagatatcaaacccatcctgaggaagctcccgcgtatcaagaaacacttgttaaatggtgataatatgaggtgttcagtgaatgcgactcctcagcagatgcctcagacagaaaaagcggtcgaagacttccttagaagcatcggtcggagtaaaaaggaacggaggcctgtgcgcccacacacggtcgagaaacctgtgcccagcagctctggtggagatgcccacgttccccatggctcccaggtcattaggaagctggtcatggaacccaccttcaagccctggcagatgaagactcacttcctgatgcccttcccggtgaattacgtgggtgaatgcatccgaactgtcccctacacggacccagatcatgccagtcttaaaatccttgcacgtttgatgactgccaaattcttgcatacagaaattcgagaaaaaggcggtgcttatggtggangcgcaaaactcagccacaatgggattttcaccctttactcttacagggacccaaatacaatagagacgctccagtcttttgggaaggctgtcgactgggctaagtctggaaaattcacacagcaagacatcgacgaagccaaactttctgtcttctcaaccgtagatgctcctgtcgctccttcagacaaaggaatggaccacttcttgtacggcctctcggatgagatgaagcaggcccacagagagcagctctttgctgtcagccacgacaagctcctggccgtgagcgataggtacctcggcactgggaagagcacacacggcctggccatcctcggacccgagaacccgaaaattgccaaggacccatcctggatcatccgatgagcagccgtggcgctcgactgcacaggagcccgagacaatacacctccaagctgaatatgaaaagtcagaaatgctactgctttttccaagaatattatgtcattgagtgtcgccaaagcccttgactggcgagtcaaaaactcagatctatcttaagagtgaccaggaagaggttcattgaaataatcatgcatgaagcgccaaagatgcaccatgtagaattttcactttgtactggcaggctcgttttacctgattctagaatatttaagaatctaaaaataaagggcaactctgactta

SEQ ID NO: 172 - DNA, 2579 bp, Homo sapiens
tgagaccgtcagaagcctcatagacagaacgattgatgaagtagttgagaaaggatttgaagatgatcgaattgaggctttacttcataaaattgaaatacagatgaaacatcagtctaccagctttgggctgatgctgacatcagtaagtgatctctcaacaattttgtttttgttttataatagacattttgtcttgttactagcttaactggcattttgatatttttatgtgaaatagattactttaaatgggtaagggtttataactagtaatctgttggttatttcctaaacattatttcagcctgtgctttttattttattggaacaaaacagggctaaagtaagtttttttgtttctccatccaaagaattacatgacttttgttataaacaatcatctgtggtatatttaaatacagaaactaggattttagtatcaagtctgggctgttggtggaggttgtactgtggtaccagctgcattgtggatgtggaaatcttccttccagtacatagcttcttgctggaaccatgatggggaccctgtggagctcttgaagttgggaaatcagttagctaaattcagacagtgcctgcaggaaaatccaaaatttttgcaagaaaaagtaaaacagtattttaagaataaccagcataagctgactttatcgatgaggccagatgacaagtatcacgagaagcaggcacaggtggaagccacgaagctcaagcagaaggtcgaggctctgtcccccggagacaggcagcagatctacgagaaaggtctagaattacggagtcaacaaagcaaacctcaagatgcctcttgtctgccagcgttgaaagtttccgatattgaacccaccatacctgtcacagagttggacgtggtcctgacagctggagatatccctgttcagtactgcgcccagcccaccaatggcatggtgtatttccgggccttctccagcctgaacacactccccgaggagctgaggccctatgtgcccctcttctgcagcgtcctcaccaagctgggctgcggccttcttgactaccgggagcaggctcagcagatagaattgaagaccggagggatgagtgcttctccccacgtgctccccgacgactcacacatggacacctacgagcagggtgtgcttttctcctctctctgcctggatcgaaacctgccagacatgatgcagctatggagtgaaatatttaacaacccgtgctttgaagaagaggagcacttcaaggtgctggtgaagatgaccgcccaggagctcgccaatggaattcctgactctgggcacctgtacgcatccatcagggcaggccggaccctcacgcccgcaggggacctgcaggagaccttcagcgggatggatcaggtgcggctgatgaagaggattgcagaaatgacagatatcaaacccatcctgaggaagctcccacgtatcaagaaacacttgttaaatggtgataatatgaggtgttcagtgaatgcgactcctcagcagatgcctcagacagaaaaagcggtcgaagacttccttagaagcatcggtcggagtaaaaaggaacggaggcctgtgcgcccacacacggtcgagaaacctgtgcccagcagctctggtggagatgcccacgttccccatggctcccaggtcattaggaagctggtcatggaacccaccttcaagccctggcagatgaagactcacttcctgatgcccttcccggtgaattacgtgggtgaatgcatccgaactgtcccctacacggacccagatcatgccagtcttaaaatccttgcacgtttgatgactgccaaattcttgcatacagaaattcgagaaaaaggcggtgcttatggtggaggcgcaaaactcagccacaatgggattttcaccctttactcttacagggacccaaatacaatagagacgctccagtcttttgggaaggctgtcgactgggctaagtctggaaaattcacacagcaagacatcgacgaagccaaactttctgtcttctcaaccgtagatgctcctgtcgctccttcagacaaaggaatggaccacttcttgtacggcctctcggatgagatgaagcaggcccacagagagcagctctttgctgtcagccacgacaagctcctggccgtgagcgatagatacctcggcactgggaagagcacacacggcctggccatcctcggacccgagaacccgaaaattgccaaggacccatcctggatcatccgatgagcagccgtggcgctcgactgcacaggagcccgagacaatacacctccgagctgaatatgaaaagtcagaaatgctactgctttttccaagaatattatgtcattgagtgtcgccaaagcccttgactggcgagtcaaaaactcagatctatcttaagagtgaccaggaagaggttcattgaaataatcatgcatgaagcgccaaagatgcaccatgtagaattttcactttgtactggcaggctcgttttacctcattctagaatatttaagaatctaaaaataaagggcaactctg

SEQ ID NO: 173 - DNA, 1637 bp, Homo sapiens
tgattgcctatctcttcttgaccccaagaccttccttggatttcagaagtgtcaagccttgggatacaatctccgagactcctgctttacattagggactcaaggcgtgagggagcttctaggactgattcccagatagtctctttgatcttccttgtaggtcttcaaagcttcacctttctccaaaggcagatgtgaagaacttgatgtcttatgtggtaaccaagacaaaagcgattaatgggaaataccatcgtttcttgggtcgtcatttcccccgcttctatatcctgtacacaatcttcatgaaagaaagccttgagccgggccatgcttctcacatcttacctgcctcctcccttgttgagacatcgtttgaagactcatacaactgtgattcaccaactggacaaggctttggcaaagctggggattggccagctgactgctcaggaagtaaaatcggcttgttatctccgtggcctgaattctacgcatattggtgaagataggtgtcgaacttggctgggagaatggctgcagatttcctgcagcctgaaagaagctgagctgtctctcttgctgcacaacgtggtcctgctctccaccaactaccttgggacaaggcgctgaatgaaccatggagcggatggcattgtcctgcagtcgtatagtatagcagtgcaggaacaaacagcacttgccagcaaagtctgtgtgtactgttaagtgtgtgggaggcagagagaggagcaggggccatgggcttcacagcatggcacacctgtgggaactgcagacattcctctcacagctagaactgaaacaaaccctcttgctaggggtggtccgtgtgaggtgtcatcctgtccccctcataattactaatagctggaactggcagcagcctctactgggcttttactgtgatgtgttcagttcatgtcctaggaagtcagcttttgccccaggtgggaatccttatttggcttaggactgatccacttccatgttacttacatctgtgggtttttgttgttgctgttagaaaatttgtggctggtgaaaacagcactcctttggctggagcacttgtgtccgtgcatgtacttgggtgtttccctccatcctttctgatatgaccaaaaatcaagttgttttgttttttgtcaccttcactggcatgggctaaccacttctttttcaaaccctctgaacacctttttctgatgggtaacttgcaggaatattctattggaaaagataacaggaagtacaagtgcttcttgaccccttcctcaatgtttctagccttcactctccattgtcttttctgggctgtattacagccctctgtggatcttcaactctgctgcctccactgtgatgcagcagtccaactgtaactgacagtggctgccttctctgggccatggatcacacctgtaaggtactaattactgcccagcctggggagatcaggagaggtctgcatagttagtaagttgggtttagcttttgtgtgtgcatcagtgacttagagttctgtaataacttattgtaaatgcatgaagcactgtttttaaacccaagtaaagactgcttgaaacctgttgatggaaaaaaaaaaaaaaaaa

SEQ ID NO: 174 - DNA, 1781 bp, Homo sapiens
gggccgctcccagctgggacgtgagtctctggattaggcaggcagaggcagttatgggcttctgcagtggcgagaaaggaagcgcctgaagggtcgtgaggctggggcgggacccggcaccgctggggcggccaggccgtgaggacttcaatggcgagcagcgtggacgaggaggcgctgcaccagctgtacctgtgggtagacaacatccctctgtcccggcccaagcgaaacctctcccgggactttagcgatggagtccttgttgcagaggtcatcaagttttacttccccaagatggtggagatgcacaattatgtccccgccaactctctccagcagaagctcagcaactggggtcatctgaacaggaaggtactgaagaggctgaacttttcagtaccggatgacgtgatgcgcaagatcgcgcagtgcgccccaggcgtggtggagctggtgctcatcccgctgaggcagcgcctggaggagaggcagaggcgcaggaagcagggcgccggctccttacaggagctggctccccaggatggcagtggctacatggatgtgggtaaggtggccttttccatttctccctcccggttggagctttccttctgtccttcttcctgtcacttgtaagagtggaagtagggagggggaagcaggagaatgagactccagcacagtcattcctccacttgccttgtctcaggtgtatcccagaaggcccgaggtgaaggtgtcccggacccccagggagggggtcagctcagctgggaccggccgccggcgcctcggcctccagcgtataaccgggcgttgcagggcgaccccagcttcgtcctccagatcgctgaaaaggagcaggagctgttggcctctcaagagaccgtgcaggtcctgcagatgaaggtaaggcgcctggagcacctgctccagctcaagaatgtgcggatcgaagacctctcccggcggctccagcaggcggagcgtaagcagcggtgagcggcggcccgggccgcgcggggacgcccgggtacccgccagagccccgacgccgcgccggacccacccaccgatggatagaccattgggagggcggagcccgctgctctcacgagcctgctggggcccgagtgccctccttccttgggatgggtgagcgtgggaggagatgggacaggaactctaggagcgcaggcccgggactgagccgcctcctaccactccggagatccgggtcaggagaatggaccgctttccagagcccagaagccacgtgcagagacctagcctgtcccccaaagcagtgtccaacaccttgggcccggccttgcatctcccggcgctgggccttggggggcggtcccttggctctgtccacacccccagaatcaggtccccgcccagctccgaggacggcggcgtctccatccacgctagttccccatgccctcagccatgggggaatctgtcccgggccgctgaggggctcccctgcccctcctgggagcttacctgggacccacctcggcgacggagaccgcagcagctggagaggaaggggtgaggcgtgggatcgccaggagtagggaggacatcgacgatgtgcccgtagcagtcgcccctccctcctcgcgcacggggtactgaggcggaaggtttgaaggttacggctcagggctgccccattaaagtcagtgttgtgttctaaaaaaaaaaaaaaaaaaaaaaaaaaaaaaaaaaaaaaaaaaaaaaaaaaaaaaaaaaaaaaaaaaaaa

SEQ ID NO: 175 - DNA, 3463 bp, Homo sapiens
agcgcgcggaagaaaaaccagcaagaaggcggcgggggaagatggcggtcctggggtagagtttgcaagctttctgactaggctagtcgagtaactattcgggtcatggcgtcaaactcaactaagtctttcctggcagatgccggctatggcgaacaggaactggatgccaactctgcccttatggaattggacaaaggcctaagatctggcaaacttggtgaacagtgtgaagcagttgttcgctttcccagactttttcagaagtatccattccctattcttatcaattctgcattcctaaagttagctgatgttttcagagttggaaataatttcctgaggctatgtgttcttaaagttacccaacaaagtgagaaacatttggagaagattctaaatgtggatgaatttgtgaagagaattttttctgtgattcatagtaatgatcctgtggcaagagccatcaccctccggatgttgggaagtctggcatcaataattcctgagaggaagaatgctcatcatagtattcgtcagagtttagattcacatgataatgtagaagttgaagctgctgtttttgctgctgcaaacttctctgcacagtcaaaggattttgctgtaggaatctgtaacaaaatcagtgaaatgattcaaggtttagcgacaccagtagacttgaagctaaaattgatacccattctacagcacatgcaccatgatgcaatcttggcttccagtgctcgtcagcttttacaacagctggtcacatcctatccgtccaccaaaatggtgattgtgtctttgcacactttcactctgcttgcagcgtcatctttggttgatacacctaagcagattcagcttctgttgcagtatttgaagaatgatcccaggaaggcagtaaagagacttgctattcaagatctgaaattacttgctaataaaacaccacatacttggagtagggagaatattcaggcactttgtgagtgtgccctccagactccttatgacagcttaaaactagggatgttgtctgtcctttccacactatcagggaccatcgccatcaaacattacttcagtatagttccaggaaatgtgagttcttctcccagatcttctgatttagtcaaattagcccaagagtgctgttaccataataacaggggcattgcagctcatggagttagagtcctaactaatataactgtttcttgtcaagaaaaggatcttttggcactggaacaagatgctgtctttggcctggaatccctactggtactttgtagtcaagatgatagtccaggtgctcaggccactttaaagattgctctaaactgtatggtgaagttggccaagggcaggccccatcttagccagtcagtagttgagaccttgttgactcaattgcacagtgctcaagacgctgcccggattttgatgtgccattgcctggcagccattgccatgcaactgccggtgctgggtgatgggatgcttggtgacctcatggagctgtacaaggtgattggacgatcagccacagacaagcaacaagaacttctggtgagtttggctactgtgatttttgttgcaagtcagaaggcattgtctgtggaaagtaaggcagtaattaagcagcagcttgaaagtgtctccaatggatggactgtataccgtattgccagacaggcttccagaatgggtaatcatgacatggccaaagagctttatcagagtttgctgactcaggttgcctcagaacatttctacttctggctaaatagtttgaaggagttttcacatgcagaacagtgtctcactgggttgcaagaggaaaattatagttcagcactttcttgcattgctgaatctttaaaattctatcacaaagggattgcttccttaacagcagctagtacaccactgaatcctttaagctttcagtgtgaatttgtaaaactcaggattgaccttttacaagccttctctcaacttatctgtacttgtaatagcctgaagacaagcccaccacctgcaattgccacaacaattgccatgaccttaggaaatgacctccagaggtgtggtcgcatctccaatcagatgaaacagtccatggaagaatttcgaagccttgcttctcgatatggagatctttaccaggcatcttttgatgctgactcagcaactttgaggaatgttgaactacagcagcagagctgtttactgatatctcatgcaatagaagccctgattttggatccagaatcagcaagtttccaggaatatggatctactggaacagcccatgctgatagtgaatatgaaagaagaatgatgtctgtatataatcatgtcttggaggaggtagaatcactcaatcggaaatatacccctgtttcttatatgcacacagcatgcctctgcaatgccatcattgctttgctgaaagttcccctttctttccagagatattttttccagaaactacagtctaccagcatcaagcttgctctgtcaccatcgccccggaatcctgcagagcccattgctgtccagaataaccagcagctggcgctaaaggtagagggagtggttcagcacggatctaaaccaggactcttccgcaaaattcagtctgtctgtctgaatgtttcttccacactgcagagtaaatctggacaagactacaagatacccattgacaacatgaccaatgagatggagcaaagggttgaacctcataatgattacttcagtactcaatttctgttgaactttgctatccttggaacacacaacattacagtggaatcttctgtgaaagatgccaatggtatagtatggaagactggtcccagaactaccatatttgtaaaatccctggaagacccttattcccagcaaattcgcttacaacagcagcaagcccagcagccattacagcagcagcagcaacgcaatgcctacacacggttttaaccatggaatgaatgcactgcagactctcaagagatcaatcaaattgccagaaacagtttggtttttcatatggaataagtattaaagttacagtgtagttcatttattcattgatttttgtaatgtaatattctggaaaaaattttgttttcttaaaaattttgtctgacagctgggcgtggttgctcacgcctgtaatcccagcactttgggaggctgaggtgggcggctcacgaggagatcaagaccatcctggctaacacagtgaaaccccgtctccactaaaaaatacaaaaaaattagccaagcatggtggcaggcgcctgtagtcccagctacttgggaggctgaggcaggagaatggtgtgaacctgggaggcggagcttgcagtgagccgagactgtgctccagcctgggcgacagagcgagactccgtctcaaaaaaataaataaatacattttgtctgg

SEQ ID NO: 176 - DNA, 1728 bp, Homo sapiens
cgggaagtaggcggggtgacgtgtggttgacgagctcggcggcgggtttgctgagatctgtggccggcggcagctggtgcggggggcagctgagagcgagaggtggatcggggcggtgtgtggccagggccatgacgggcaacgccggggagtggtgcctcatggaaagcgaccccggggtcttcaccgagctcattaaaggattcggttgccgaggagcccaagtagaagaaatatggagtttagagcctgagaattttgaaaaattaaagccagttcatgggttaatttttcttttcaagtggcagccaggagaagaaccagcaggctctgtggttcaggactcccgacttgacacgatattttttgctaagcaggtaattaataatgcttgtgctactcaagccatagtgagtgtgttactgaactgtacccaccaggatgtccatttaggcgagacattatcagagtttaaagaattttcacaaagttttgatgcagctatgaaaggcttggcactgagcaattcagatgtgattcgacaagtacacaacagtttcgccagacagcaaatgtttgaatttgatacgaagacatcagcaaaagaagaagatgcttttcactttgtcagttatgttcctgttaatgggagactgtatgaattagatggattaagagaaggaccgattgatttaggtgcatgcaatcaagatgattggatcagtgcagtaaggcctgtcatagaaaaaaggatacaaaagtacagtgaaggtgaaattcgatttaatttaatggccattgtgtctgacagaaaaatgatatatgagcagaagatagcagagttacaaagacaacttgcagaggaggaacccatggatacagatcaaggtaatagtatgttaagtgctattcagtcagaagttgccaaaaatcagatgcttattgaagaagaagtacagaaattaaaaagatacaagattgagaatatcagaaggaagcataattatctgcctttcattatggaattgttaaagactttagcagaacaccagcagttaataccactagtagaaaaggcaaaagaaaaacagaacgcaaagaaagctcaggaaaccaaatgaagatgttttcagatatgtacacatttctgcttctgcacatattttcatggaaaccattatgtataaagaacttagagcaacatcctaattggctcagtgcacgtttggcaatagtgccagcctgtcttgtctttaatgcatggattcataaacttcttccctacctgcatcatgtgcatgtagtgcatattaaatgaaagtgatattaagaatgctttcccaaattccattatttgacattgagtctgacaactgttagttttctggttgtccaactaccatatgaagctagaaaatgcacaaacgatattccttatctgtaatttaaatacttaaaatttgcaattgtcagatcttgattaaactggttgtcttatttcttctcatcattaacggaaaaaaaatcagtatttctatctttgatatctaagtgttttgaggattttaaaactgaattttatctgctataccagttatttgagaaagtatgattttaatgtaaatcatttaaaaaggacaaaagtataatttccagtgattttcactgctgtcagtagaaaagtaataaacatctcaattttaaaaaaaaaaaaaaaaaaaaaaaaaa

SEQ ID NO: 177 - DNA, 1833 bp, Homo sapiens
ggcacgagtgggagtacaggactcgcctcctcagggttccctgtgctgccacttttcagccatggccacaagtgaacagagtatctgccaagcccgggcttccgtgatggtctacgatgacaccagtaagaaatgggtaccaatcaaacctggccagcagggattcagccggatcaacatctaccacaacactgccagcaacaccttcagagtcgttggagtcaagttgcaggatcagcaggttgtgatcaattattcaatcgtgaaagggctgaagtacaatcaggccacgccaaccttccaccagtggcgagatgcccgccaggtctacggcttaaactttgcaagtaaagaagaggcaaccacgttctccaatgcaatgctgtttgccctgaacatcatgaattcccaagaaggaggcccctccagccagcgtcaggtgcagaatggcccctctcctgatgagatggacatccagagaagacaagtgatggagcagcaccagcagcagcgtcaggaatctctagaaagaagaacctcggccacagggcccatcctcccaccaggacatccttcatctgcagccagcgcccccgtctcatgtagtgggcctccaccgccccccccacccccagtcccacctccacccactggggctaccccacctcccccacccccactgccagccggaggagcccaggggtccagccacgacgagagctccatgtcaggactggccgctgccatagctggggccaagctgagaagagtccaacggccagaagacgcatctggaggctccagtcccagtgggacctcaaagtccgatgccaaccgggcaagcagcgggggtggcggaggaggcctcatggaggaaatgaacaaactgctggccaagaggagaaaagcagcctcccagtcagacaagccagccgagaagaaggaagatgaaagccaaatggaagatcctagtacctccccctctccggggacccgagcagccagccagccacctaactcctcagaggctggccggaagccctgggagcggagcaactcggtggagaagcctgtgtcctcgattctgtccagaaccccgtctgtggcaaagagccccgaagctaagagcccccttcagtcgcagcctcactctaggatgaagcctgctgggagcgtgaatgacatggccctggatgccttcgacttggaccggatgaagcaggagatcctagaggaggtggtgagagagctccacaaggtgaaggaggagatcatcgacgccatcaggcaggagctgagtgggatcagcaccacgtaaggggccggcctcgctgcgctgattcgtcgagcccatccggcgacagaggacagccagaagcccagccagccccagactccagtgcaccagagcacgcacaggagcctgggcgcgctgctgtgaaacgtcctgacctgtgatcacacatgacagtgaggaaaccaagtgcaactcctgggtttttttagattctgcctgacacggaacaccaggtctgctcgtcttttttgtgttttatatttgcttatttaaggtacatttctttgggtttctagagacgcccctaagtcacctgcttcattagacggtttccaggttttctcccaggtgacgctgttagcgcctcagctggcggtgacagccggcccagcgtggcgccaccacacaccgcagagctgtccaggcacagctccgtccccagcgctcatggtgttgaaactgtctgtcatgcaccacggtgtctgtgtccacacagtaataaacggtttactgtccgcaaaaaaaaaaaaaaaaaa

SEQ ID NO: 178 - DNA, 2268 bp, Homo sapiens
  misc_feature (13)..(13): n is a, c, g, or t
gggatttgaaccncgctgacgaagtttggtgatccatcttccgagtatcgccgggatttcgaatcgcgatgatcatcccctctctagaggagctggactccctcaagtacagtgacctgcagaacttagccaagagtctgggtctccgggccaacctgagggcaaccaagttgttaaaagccttgaaaggctacattaaacatgaggcaagaaaaggaaatgagaatcaggatgaaagtcaaacttctgcatcctcttgtgatgagactgagatacagatcagcaaccaggaagaagctgagagacagccacttggccatgtcaccaaaacaaggagaaggtgcaagactgtccgtgtggaccctgactcacagcagaatcattcagagataaaaataagtaatcccactgaattccagaatcatgaaaagcaggaaagccaggatctcagagctactgcaaaagttccttctccaccagacgagcaccaagaagctgagaatgctgtttcctcaggtaacagagattcaaaggtaccttcagaaggaaagaaatctctctacacagatgagtcatccaaacctggaaaaaataaaagaactgcaatcactactccaaactttaagaagcttcatgaagctcattttaaggaaatggagtccattgatcaatatattgagagaaaaagaaacattttgaagaacacaattccatgaatgaactgaagcagcagcccatcaataagggaggggtcaggactccagtacctccaagaggaagactctctgtggcttctactcccatcagccaacgacgctcgcaaggccggtcttgtggccctgcaagtcagagtaccttgggtctgaaggggtcactcaagcgctctgctatctctgcagctaaaacgggtgtcaggttttcagctgctactaaagataatgagcataagcgttcactgaccaagactccagccagaaagtctgcacatgtgaccgtgtctgggggcaccccaaaaggcgaggctgtgcttgggacacacaaattaaagaccatcacggggaattctgctgctgttattaccccattcaagttgacaactgaggcaacgcagactccagtctccaataagaaaccagtgtttgatcttaaagcaagtttgtctcgtcccctcaactatgaaccacacaaaggaaagctaaaaccatgggggcaatctaaagaaaataattatctaaatcaacatgtcaacagaattaacttctacaagaaaacttacaaacaaccccatctccagacaaaggaagagcaacggaagaaacgcgagcaagaacgaaaggagaagaaagcaaaggttttgggaatgcgaaggggcctcattttggctgaagattaataattttttaatatcttgtaaatattcctgtattctcaacttttttccttttgtaaatttttttttttttgctgtcatccccactttagtcacgagatctttttctgctaactgttcatagtctgtgtagtgtccatgggttcttcatgtgctatgatctctgaaaagacgttatcaccttaaagctcaaattctttgggatggtttttacttaagtccattaacaattcaggtttctaacgagacccatcctaaaattctgtttctagatttttaatgtcaagttcccaagttccccctgctggttctaatattaacagaactgcagtcttctgctagccaatagcatttacctgatggcagctagttatgcaagcttcaggagaatttgaacaataacaagaatagggtaagctgggatagaaaggccacctcttcactctctatagaatatagtaacctttatgaaacggggccatatagtttggttatgacatcaatattttacctaggtgaaattgtttaggcttatgtaccttcgttcaaatatcctcatgtaattgccatctgtcactcactatattcacaaaaataaaactctacaactcattctaacattgcttacttaaaagctacatagccctatcgaaatgcgaggattaatgctttaatgcttttagagacagggtctcactgtgttgcccaggctggtctcaaactccaccaaatgtacttcttattcattttatggaaaagactaggctttgcttagtatcatgtccatgtttccttcacctcagtggagcttctgagttttatactgctcaagatcgtcataaataaaattttttctcattgtcaaaaaaaaaaaaaaa

SEQ ID NO: 179 - DNA, 4221 bp, Homo sapiens
cgataacgatttgtgttgtgagaggcgcaagctgcgatttctgctgaacttggaggcatttctacgacttttctctcagctgaggcttttcctccgaccctgatgctcttcaattcggtgctccgccagccccagcttggcgtcctgagaaatggatggtcttcacaataccctcttcaatcccttctgactggttatcagtgcagtggtaatgatgaacacacttcttatggagaaacaggagtcccagttcctccttttggatgtaccttctcttctgctcccaatatggaacatgtactagcagttgccaatgaagaaggctttgttcgattgtataacacagaatcacaaagtttcagaaagaagtgcttcaaagaatggatggctcactggaatgccgtctttgacctggcctgggttcctggtgaacttaaacttgttacagcagcaggtgatcaaacagccaaattttgggacgtaaaagctggtgagctgattggaacatgcaaaggtcatcaatgcagcctcaagtcagttgccttttctaagtttgagaaagctgtattctgtacgggtggaagagatggcaacattatggtctgggataccaggtgcaacaaaaaagatgggttttataggcaagtgaatcaaatcagtggagctcacaatacctcagacaagcaaaccccttcaaaacccaagaagaaacagaattcaaaaggacttgctccttctgtggatttccagcaaagtgttactgtggtcctctttcaagacgagaataccttagtctcagcaggagctgtggatgggataatcaaagtatgggatttacgtaagaattatactgcttatcgacaagaacccatagcatccaagtctttcctgtacccaggtagcagcactcgaaaacttggatattcaagtctgattttggattccactggctctactttatttgctaattgcacagacgataacatctacatgtttaatatgactgggttgaagacttctccagtggctattttcaatggacaccagaactctaccttttatgtaaaatccagccttagtccagatgaccagtttttagtcagtggctcaagtgatgaagctgcctacatatggaaggtctccacaccctggcaacctcctactgtgctcctgggtcattctcaagaggtcacgtctgtgtgctggtgtccatctgacttcacaaagattgctacctgttctgatgacaatacactaaaaatctggcgcttgaatagaggcttagaggagaaaccaggaggtgataaactttccacggtgggttgggcctctcagaagaaaaaagagtcaagacctggcctagtaacagtaacgagtagccagagtactcctgccaaagcccccagggtaaagtgcaatccatccaattcttccccgtcatccgcagcttgtgccccaagctgtgctggagacctccctcttccttcaaatactcctacgttctctattaaaacctctcctgccaaggcccggtctcccatcaacagaagaggctctgtctcctccgtctctcccaagccaccttcatctttcaagatgtcgattagaaactgggtgacccgaacaccttcctcatcaccacccatcactccacctgcttcggagaccaagatcatgtctccgagaaaagcccttattcctgtgagccagaagtcatcccaagcagaggcttgctctgagtctagaaatagagtaaagaggaggctagactcaagctgtctggagagtgtgaaacaaaagtgtgtgaagagttgtaactgtgtgactgagcttgatggccaagttgaaaatcttcatttggatctgtgctgccttgctggtaaccaggaagaccttagtaaggactctctaggtcctaccaaatcaagcaaaattgaaggagctggtaccagtatctcagagcctccgtctcctatcagtccgtatgcttcagaaagctgtggaacgctacctcttcctttgagaccttgtggagaagggtctgaaatggtaggcaaagagaatagttccccagagaataaaaactggttgttggccatggcagccaaacggaaggctgagaatccatctccacgaagtccgtcatcccagacacccaattccaggagacagagcggaaagacattgccaagcccggtcaccatcacgcccagctccatgaggaaaatctgcacatacttccatagaaagtcccaggaggacttctgtggtcctgaacactcaacagaattatagattctaatctgagtgagttactgagctttggtccactaaaacaagctgagctttggtccactaaaacaagatgaaaaatacaagagtgactctataactctggtctttaagaaagctgccttttcatttttagacaaaatcttttcaacgctgaaatgtacctaatctggttctactaccataatgtatatgcagcttcccgaggatgaatgctgtgtttaaatttcataaagtaaatttgtcactctagcattttgaatgaatagtcttcactttttaaattattcatcttctctataataatgacatcccagttcatggaggcaaaaaacaagtttcttgttatcctgaaactttctatgctcagtggaaagtatctgccagccacagcatgaggcctgtgaaggctgactgagaaatcctctgctgaagacccctggttctgttctgcctccaacatgtataattttatttgaaatacataatcttttcactatgcttttgtggggttttttttaagtatgtgtaaaaatgtgatgctcagataagtacatttatatcagttcagtgttaaaatgcagtctcttgagttaaagtcatctttattttaaatgcagtgataaatgtcaactcttcggagaaactaggagaacaacaacagaaagctgtgtttgtcttttttctctcaaatatatctcccgtatgagatttcaggtccccatgttttcaccaagcaatctgctatgtcagccaacccaacatcactttctacaggaggttatgatttttgccatttactagaggaagatgttttatgaaatcaatttggggtttgaattcaggtgcagtcatcagttctttaggggctgcaatgttttaaaaaaaataagtcatcagattttaagaaaaaagtgatgatttcttattgatatttttgtaacagaatatagctcttaactgaaaatccagaaccagaaacataaatcttgagtttcttttcatgtacataaaaagcaatagccttttagtatagatagccctgagccaaaaagtaatagaattttctctagatatttaatacagagagtgtatagactgactctaagttaataatgtgcaaaatatcttaaacatccctccccttattcaacaattatgtatcagtgatcttgaaccattgttttatatttttcacctttgtaacctcatggaaagaggctttacatactttctatgtactatttacttagaagggagcccccttccagtcatgaaacttcatttgttttatccatatccctgaggactgtgtagactttatgtcagttctgtgtagactttatgtcagtttttgtcattatttgaaaatctattctgacaactttttaattcctttgatcttataagttaaagctgtaacaactgaaattgcatggatcaagtaagcatagttttatccagggagaaaaataaaaggaagccatagaattgctctggtcaaaaccaagcacaccatagccttaactgaatatttaggaaatctgcctaatctgcttatatttggtgtttgttttttgactgttgggctttgggaagatgttatttatgaccaatatctgccagtaacgctgtttatctcacttgctttgaaagccaatgggggaaaaaaatccatgaaaaaaaaaagattgataaagtagatgattttgtttgtatccctacccatctcctggcagccctactgagtgaaattgggatacatttggctgtcagaaattataccgagtctactgggtataacatgtctcacttggaaagctagtacttttaaatgggtgccaaaggtcaactgtaatgagataattatccctgcctgtgtccatgtcagactttgagctgatcctgaataataaagccttttacctt

SEQ ID NO: 180 - DNA, 3179 bp, Homo sapiens
ccccccctttttgaaattatgtgctgctgtttaaaacaacaaacaaaaaaaacaacaaaaacacagcaactgcggattttgtccccggctggagcccagcgccccgcctggaatggatgagcctctccatgagagatccggtcattcctgggacaagcatggcctaccatccgttcctacctcaccgggcgccggacttcgccatgagcgcggtgctgggtcaccagccgccgttcttccccgcgctgacgctgcctcccaacggcgcggcggcgctctcgctgccgggcgccctggccaagccgatcatggatcaattggtgggggcggccgagaccggcatcccgttctcctccctggggccccaggcgcatctgaggcctttgaagaccatggagcccgaagaagaggtggaggacgaccccaaggtgcacctggaggctaaagaactttgggatcagtttcacaagcggggcaccgagatggtcattaccaagtcgggaaggcgaatgtttcctccatttaaagtgagatgttctgggctggataaaaaagccaaatacattttattgatggacattatagctgctgatgactgtcgttataaatttcacaattctcggtggatggtggctggtaaggccgaccccgaaatgccaaagaggatgtacattcacccggacagccccgctactggggaacagtggatgtccaaagtcgtcactttccacaaactgaaactcaccaacaacatttcagacaaacatggatttactttggccttcccaagtgatcacgctacgtggcaggggaattatagttttggtactcagactatattgaactccatgcacaaataccagccccggttccacattgtaagagccaatgacatcttgaaactcccttatagtacatttcggacatacttgttccccgaaactgaattcatcgctgtgactgcataccagaatgataagataacccagttaaaaatagacaacaacccttttgcaaaaggtttccgggacactggaaatggccgaagagaaaaaagacaacagctcaccctgcagtccatgagggtgtttgatgaaagacacaaaaaggagaatgggacctctgatgagtcctccagtgaacaagcagctttcaactgcttcgcccaggcttcttctccagccgcctccactgtagggacatcgaacctcaaagatttatgtcccagcgagggtgagagcgacgccgaggccgagagcaaagaggagcatggccccgaggcctgcgacgcggccaagatctccaccaccacgtcggaggagccctgccgtgacaagggcagccccgcggtcaaggctcaccttttcgctgctgagcggccccgggacagcgggcggctggacaaagcgtcgcccgactcacgccatagccccgccaccatctcgtccagcactcgcggcctgggcgcggaggagcgcaggagcccggttcgcgagggcacagcgccggccaaggtggaagaggcgcgcgcgctcccgggcaaggaggccttcgcgccgctcacggtgcagacggacgcggctcgcagctcggtgcaccgccaccccttccgcaatctgaacaccatgcgcccgcggctgcgctacagcccctactccatcccggtgccggtcccggacggcagcagtctgctcaccaccgccctggccgccagcccggcctcggtggcagtggactcgggctctgaactcaacagccgctcctccacgctctcctccagctccatgtccttgtcgcccaaactctgcgcggagaaagaggcggccaccagcgaactgcagagcatccagcggttggttagcggcttggaagccaagccggacaggtcccgcagcgcgtccccgtagacccgtcccagacacgtcttttcattccagtccagttcaggctgccgtgcactttgtcggatataaaataaaccacgggcccgccatggcgttagcccttccttttgcagttgcgtctgggaaggggccccggactccctcgagagaatgtgctagagacagcccctgtcttcttggcgtggtttatatgtccgggatctggatcagattctgggggctcagaaacgtcggttgcattgagctactgggggtaggagttccaacatttatgtccagagcaacttccagcaaggctggtctgggtctctgccaccaggcggggaggtgttcaaagacatctcctcagtgcggatttatatatatatttttcttcactgtgtcaaagtggaaacaaaaacaaaatctttcaaaaaaaaaatccggacaagtgaacacattaacatgattctgtttgtgcagattaaaaactttatagggacttgcattatcggttctcaataaattactgagcagctttgtttggggagggaagtccctaccatccttgtttagtctatattaagaaaatctgtgtctttttaatattcttgtgatgttttcagagccgctgtaggtctcttcttgcatgtccacagtaatgtatttgtggtttttattttgaacgcttgcttttagagagaaaacaatatagccccctacccttttcccaatcctttgccctcaaatcagtgacccaagggagggggggatttaaagggaaggagtgggcaaaacacataaaatgaatttattatatctaagctctgtagcaggattcatgtcgttctttgacagttctttctctttcctgtatatgcaataacaaggttttaaaaaaaaaaaaaaaaagtgagactattagacaaagtatttatgtaattatttgataactcttgtaaataggtggaatatgaatgcttggaaaattaaactttaatttattgacattgtacatagctctgtgtaaatagaattgcaactgtcaggttttgtgttcttgttttcctttagttgggtttatttccaggtcacagaattgctgttaacactagaaaacacacttcctgcaccaacaccaataccctttcaaaagagttgtctgcaacatttttgttttcttttttaatgtccaaaagtgggggaaagtgctatttcctattttcaccaaaattggggaaggagtgccactttccagctccacttcaaattccttaaaatataactgagattgct

SEQ ID NO: 181 - DNA, 1266 bp, Homo sapiens
gcgcgccgtccctgcgccccgctccgcccgcgcctctctcccagcgccgcgcctcgggcgtaaagagcgcgcccctcgcaccgcagccagtgccgaccgcagcagcccagccccagccttcctccgcctccgcctctctctcctcctcctcctccgccgccggacacgcagccgcagccgggaccgggacgcagctggggagtcagggacgcgcgcagccagcccttccccctccggctcccgcaccgccggccgcctcccctcgccctcctactctcccctccctgctccttcgctttttcctcctcctcctctcccggccccggctgccagcaccatgtccgcagggggagattttgggaatccactgagaaaattcaagttggtgttcttgggggagcagagcgtcgggaagacgtctctgattacgaggttcatgtacgacagcttcgacaacacataccaggcaaccattgggattgacttcttgtcaaaaaccatgtacttggaggaccgcacggtgcgactgcagctctgggacacagctggtcaggagaggttccgcagcctgatccccagctacatccgggactccacggtggctgtggtggtgtacgacatcacaaatctcaactccttccaacagacctctaagtggatcgacgacgtcaggacagagaggggcagtgatgttatcatcatgctggtgggcaacaagacggacctggctgataagaggcagataaccatcgaggagggggagcagcgcgccaaagaactgagcgtcatgttcattgagaccagtgcgaagactggctacaacgtgaagcagctttttcgacgtgtggcgtcggctctacccggaatggagaatgtccaggagaaaagcaaagaagggatgatcgacatcaagctggacaaaccccaggagcccccggccagcgagggcggctgctcctgctaatgcagagccgacctgtggcttcccatgacactccttgcttgttgtgttgcttcctattggctagcttcctaaggggggagggaaccgagttatcaagatgggaggatttttcttttctctctgtctttaggagtagggtgggatggggagggaggctgggcatcagggatcacatcactcttaacggctgttacttaaacaactattttttggtttggttgtaatatattgtactttattaagattgccaaaaactgttaaaatttaaaaaaaatttaaatcatgtgtatacaattttttgc

SEQ ID NO: 182 - DNA, 2396 bp, Homo sapiens
gtgccgagactcaccactgccgcggccgctgggcctgagtgtcgccttcgccgccatggacgccaccgggcgctgacagacctatggagagtcagggtgtgcctcccgggccttatcgggccaccaagctgtggaatgaagttaccacatcttttcgagcaggaatgcctctaagaaaacacagacaacactttaaaaaatatggcaattgtttcacagcaggagaagcagtggattggctttatgacctattaagaaataatagcaattttggtcctgaagttacaaggcaacagactatccaactgttgaggaaatttcttaagaatcatgtaattgaagatatcaaagggaggtggggatcagaaaatgttgatgataacaaccagctcttcagatttcctgcaacttcgccacttaaaactctaccacgaaggtatccagaattgagaaaaaacaacatagagaacttttccaaagataaagatagcatttttaaattacgaaacttatctcgtagaactcctaaaaggcatggattacatttatctcaggaaaatggcgagaaaataaagcatgaaataatcaatgaagatcaagaaaatgcaattgataatagagaactaagccaggaagatgttgaagaagtttggagatatgttattctgatctacctgcaaaccattttaggtgtgccatccctagaagaagtcataaatccaaaacaagtaattccccaatatataatgtacaacatggccaatacaagtaaacgtggagtagttatactacaaaacaaatcagatgacctccctcactgggtattatctgccatgaagtgcctagcaaattggccaagaagcaatgatatgaatgatccaacttatgttggatttgaacgagatgtattcagaacaatcgcagattattttctagatctccctgaacctctacttacttttgaatattacgaattatttgtaaacattttggttgtttgtggctacatcacagtttcagatagatccagtgggatacataaaattcaagatgatccacagtcttcaaaattccttcacttaaacaatttgaattccttcaaatcaactgagtgccttcttctcagtctgcttcatagagaaaaaaacaaagaagaatcagattctactgagagactacagataagcaatccaggatttcaagaaagatgtgctaagaaaatgcagctagttaatttaagaaacagaagagtgagtgctaatgacataatgggaggaagttgtcataatttaatagggttaagtaatatgcatgatctatcctctaacagcaaaccaaggtgctgttctttggaaggaattgtagatgtgccagggaattcaagtaaagaggcatccagtgtctttcatcaatcttttccgaacatagaaggacaaaataataaactgtttttagagtctaagcccaaacaggaattcctgttgaatcttcattcagaggaaaatattcaaaagccattcagtgctggttttaagagaacctctactttgactgttcaagaccaagaggagttgtgtaatgggaaatgcaagtcaaaacagctttgtaggtctcagagtttgcttttaagaagtagtacaagaaggaatagttatatcaatacaccagtggctgaaattatcatgaaaccaaatgttggacaaggcagcacaagtgtgcaaacagctatggaaagtgaactcggagagtctagtgccacaatcaataaaagactctgcaaaagtacaatagaactttcagaaaattctttacttccagcttcttctatgttgactggcacacaaagcttgctgcaacctcatttagagagggttgccatcgatgctctacagttatgttgtttgttacttcccccaccaaatcgtagaaagcttcaacttttaatgcgtatgatttcccgaatgagtcaaaatgttgatatgcccaaacttcatgatgcaatgggtacgaggtcactgatgatacataccttttctcgatgtgtgttatgctgtgctgaagaagtggatcttgatgagcttcttgctggaagattagtttctttcttaatggatcatcatcaggaaattcttcaagtaccctcttacttactagactgctagtggataataacatcttgactacttaaaaaagggacatattgaaaatcctggagatggactatttgctcctttgcctaacttactcatactgtaagcagattagtgctcaggagtttgatgagcaaaaagtttctacctctcaagctgcaattgctagaactctttagaaaatattattaaaatacaggagtttaccttaaaggaaaaaaaaaaaacaaaaaaaaaaaaaaaaaa

SEQ ID NO: 183 - DNA, 1564 bp, Homo sapiens
gaagcacatctggacagctgtgcggcctccttgcgggccgacgtcagccgagcacgtcccccacgtcctctccttctcgccacttattatttattcgttttcccaaagaagcgactagggacccaagtttaaaaattcctccccccactcaatgcgagacgtggccagatcccatccaacacacggtttaattttcatggggctctgggatcaaaagaacagaaacagcaacaacaaaagcccagccgctgtctgattttaagctggcaaagtgggaaaaataaagtgttgagtaaacagaccaagttggatcatggggaatttcagaggtcatgccctccctggaaccttcttttttattattggtctttggtggtgtacaaagagtattctgaagtatatctgcaaaaagcaaaagcgaacctgctatcttggttccaaaacattattctatcgattggaaattttggagggaattacaatagttggcatggctttaactggcatggctggggagcagtttattcctggagggccccatctgatgttatatgactataaacaaggtcactggaatcaactcctgggctggcatcatttcaccatgtatttcttctttgggctgttgggtgtggcagatatcttatgtttcaccatcagttcacttcctgtgtccttaaccaagttaatgttgtcaaatgccttatttgtggaggcctttatcttctacaaccacactcatggccgggaaatgctggacatctttgtgcaccagctgctggttttggtcgtctttctgacaggcctcgttgccttcctagagttccttgttcggaacaatgtacttctggagctattgcggtcaagtctcattctgcttcaggggagctggttctttcagattggatttgtcctgtatccccccagtggaggtcctgcatgggatctgatggatcatgaaaatattttgtttctcaccatatgcttttgttggcattatgcagtaaccattgtcatcgttggaatgaattatgctttcattacctggttggttaaatctagacttaagaggctctgctcctcagaagttggacttctgaaaaatgctgaacgagaacaagaatcagaagaagaaatgtgactttgatgagcttccagtttttctagataaaccttttcttttttacattgttcttggttttgtttctcgatcttttgtttggagaacagctggctaaggatgactctaagtgtactgtttgcatttccaatttggttaaagtatttgaatttaaatattttctttttagctttgaaaatattttgggtgatactttcattttgcacatcatgcacatcatggtattcaggggctagagtgatttttttccagattatctaaagttggatgcccacactatgaaagaaatatttgttttatttgccttatagatatgctcaaggttactgggcttgctactatttgtaactccttgaccatggaattatacttgtttatcttgttgctgcaatgagaaataaatgaatgtatgtattttggtgc

SEQ ID NO: 184 - DNA, 1978 bp, Homo sapiens
atcttctcaccgaagcttagtacagcgggttgaaacaatttctctaggtgagcacccctgtgacagaggagaacaagtaactctcttcctcttcaatgattgcctagagatagcaagaaaacggcacaaggttattggcacttttaggagtcctcatggccaaacccgacccccagcttctcttaagcatattcacctaatgcctctttctcagattaagaaggtattggacataagagagacagaagattgccataatgcttttgccttgcttgtgaggccaccaacagagcaggcaaatgtgctactcagtttccagatgacatcagatgaacttccaaaagaaaactggctaaagatgctgtgtcgacatgtagctaacaccatttgtaaagcagatgctgagaatcttatttatactgctgatccagaatcctttgaagtaaatacaaaagatatggacagtacattgagtagagcatcaagagcaataaaaaagacttcaaaaaaggttacaagagcattctctttctccaaaactccaaaaagagctcttcgaagggctcttatgacatcccacggctcagtggagggaagaagtccttccagcaatgataagcatgtaatgagtcgtctttctagcacatcatcattagcaggtatcccttctccctcccttgtcagccttccttccttctttgaaaggagaagtcatacgttaagtagatctacaactcatttgatatgaagcgttaccaaaatcttaaattatagaaatgtatagacacctcatactcaaataagaaactgacttaaatggtacttgtaattagcacttggtgaaagctggaaggaagataaataacactaaactatgctatttgatttttcttcttgaaagggtaaggtttacctgttacattttcaagttaattcatgtaaaaaatgatagtgattttgatgtaatttatctcttgtttgaatctgtcattcaaaggccaataatttaagttgctatcagctgatattagtagctttgcaaccctgatagagtaaataaattttatgggcgggtgccaaatactgctgtgaatctatttgtatagtatccatgaatgaatttatggaaatagatatttgtgcagctcaatttatgcagagattaaatgacatcataatactggatgaaaacttgcatagaattctgattaaatagtgggtctgtttcacatgtgcagtttgaagtatttaaataaccactcctttcacagtttattttcttctcaagcgttttcaagatctagcatgtggattttaaaagatttgccctcattaacaggaataacatttaaaggagattgtttcaaaatatttttgcaaattgagataaggacagaaagattgagaaacattgtatattttgcaaaaacaagatgtttgtagctgtttcagagagagtacggtatatttatggtaattttatccactagcaaatcttgatttagtttgatagtgtgtggaattttattttgaaggataagaccatgggaaaattgtggtaaagactgtttgtacccttcatgaaataattctgaagttgccatcagttttactaatcttctgtgaaatgcatagatatgcgcatgttcaactttttattgtggtcttataattaaatgtaaaattgaaaattcatttgctgtttcaaagtgtgatatctttcacaatagcctttttatagtcagtaattcagaataatcaagttcatatggataaatgcatttttatttcctatttctttagggagtgctacaaatgtttgtcacttaaatttcaagtttctgttttaatagttaactgactatagattgttttctatgccatgtatgtgccacttctgagagtagtaaatgactctttgctacattttaaaagcaattgtattagtaagaactttgtaaataaatacctaaaaccc

SEQ ID NO: 185 - DNA, 3614 bp, Homo sapiens
agttttgtttacttaccatggcaatagtggccttttagccactaaaagtgatgaaactggatggacaacgttttttgactatgacagtgaaggtcgtctgacaaatgttacgtttccaactggagtggtcacaaacctgcatggggacatggacaaggctatcacagtggacattgagtcatctagccgagaagaagatgtcagcatcacttcaaatctgtcctcgatcgattctttctacaccatggttcaagatcagttaagaaacagctaccagattggttatgacggctccctcagaattatctacgccagtggcctggactcacactaccaaacagagccgcacgttctggctggcaccgctaatccgacggttgccaaaagaaacatgactttgcctggcgagaacggtcaaaacttggtggaatggagattccgaaaagagcaagcccaagggaaagtcaatgtctttggccgcaagctcagggttaatggcagaaacctcctttcagttgactttgatcgaacaacaaagacagaaaagatctatgacgaccaccgtaaatttctactgaggatcgcctacgacacgtctgggcacccgactctctggctgccaagcagcaagctgatggccgtcaatgtcacctattcatccacaggtcaaattgccagcatccagcgaggcaccactagcgagaaagtagattatgacggacaggggaggatcgtgtctcgggtctttgctgatggtaaaacatggagttacacatatttagaaaagtccatggttcttctgcttcatagccagcggcagtacatcttcgaatacgatatgtgggaccgcctgtctgccatcaccatgcccagtgtggctcgccacaccatgcagaccatccgatccattggctactaccgcaacatatacaaccccccggaaagcaacgcctccatcatcacggactacaacgaggaagggctgcttctacaaacagctttcttgggtacaagtcggagggtcttattcaaatacagaaggcagactaggctctcagaaattttatatgatagcacaagagtcagttttacctatgatgaaacagcaggagtcctaaagacagtaaacctccagagtgatggttttatttgcaccattagatacaggcaaattggtcccctgattgacaggcagattttccgctttagtgaagatgggatggtaaatgcaagatttgactatagctatgacaacagctttcgagtgaccagcatgcagggtgtgatcaatgaaacgccactgcctattgatctgtatcagtttgatgacatttctggcaaagttgagcagtttggaaagtttggagttatatattatgatattaaccagatcatttctacagctgtaatgacctatacgaagcactttgatgctcatggccgtatcaaggagattcaatatgagatattcaggtcgctcatgtactggattacaattcagtatgataacatgggtcgggtaaccaagagagagattaaaatagggccctttgccaacaccaccaaatatgcttatgaatatgatgttgatggacagctccaaacagtttacctcaatgaaaagataatgtggcggtacaactacgatctgaatggaaacctccatttactgaacccaagtaacagtgcgcgtctgacaccccttcgctatgacctgcgagacagaatcactcgactgggtgatgttcaatatcggttggatgaagatggtttcctacgtcaaaggggcacggaaatctttgaatatagctccaaggggcttctaactcgagtttacagtaaaggcagtggctggacagtgatctaccgttatgacggcctgggaaggcgtgtttctagcaaaaccagtctaggacagcacctgcagtttttttatgctgacttaacttatcccactaggattactcatgtctacaaccattcgagttcagaaattacctccctgtattatgatctccaaggacatctttttgccatggaaatcagcagtggggatgaattctatattgcatcggataacacagggacaccactggctgtgttcagtagcaatgggcttatgctgaaacagattcagtacactgcatatggggaaatctattttgactctaatattgactttcaactggtaattggatttcatggtggcctgtatgacccactcaccaaattaatccactttggagaaagagattatgacattttggcaggacggtggacaacacctgacatagaaatctggaaaagaattgggaaggacccagctccttttaacttgtacatgtttaggaataacaaccctgcaagcaaaatccatgacgtgaaagattacatcacagatgttaacagctggctggtgacatttggtttccatctgcacaatgctattcctggattccctgttcccaaatttgatttaacagaaccttcttacgaacttgtgaagagtcagcagtgggatgatataccgcccatcttcggagtccagcagcaagtggcgcggcaggccaaggccttcctgtcgctggggaagatggccgaggtgcaggtgagccggcgccgggccggcggcgcgcagtcctggctgtggttcgccacggtcaagtcgctgatcggcaagggcgtcatgctggccgtcagccagggccgcgtgcagaccaacgtgctcaacatcgccaacgaggactgcatcaaggtggcggccgtgctcaacaacgccttctacctggagaacctgcacttcaccatcgagggcaaggacacgcactacttcatcaagaccaccacgcccgagagcgacctgggcacgctgcggttgaccagcggccgcaaggcgctggagaacggcatcaacgtgacggtgtcgcagtccaccacggtggtgaacggcaggacgcgcaggttcgcggacgtggagatgcagttcggcgcgctggcgctgcacgtgcgctacggcatgaccctggacgaggagaaggcgcgcatcctggagcaggcgcggcagcgcgcgctcgcccgggcctgggcgcgcgagcagcagcgcgtgcgcgacggcgaggagggcgcgcgcctctggacggagggcgagaagcggcagctgctgagcgccggcaaggtgcagggctacgacgggtactacgtactctcggtggagcagtaccccgagctggccgacagcgccaacaacatccagttcctgcggcagagcgagatcggcaggaggtaacgcccgggccgcgcccgccgagccgctcacgccctgcccacattgtcctgtggcacaacccgagtgggactctccaacgcccaagagccttcctcccgggggaatgagactgctgttacgacccacacccacaccgcgaaaacaaggaccgcttttttccgaatgaccttaaaggtgatcggctttaacgaatatgtttacatatgcatagcgctgcactcagtcggactgaacgtagccagaggaaaaaaaaatcatcaaggacaaaggcctcgacctgttgcgctgggccgtctgttccttctaggcactgtatttaactaacttt

SEQ ID NO: 186 - DNA, 2149 bp, Homo sapiens
agcgccttcgctctttggctccctgagttagtccggttgtttgcgatcgccgcggccggggctgcgaaccgaagggctcgctccgcgccgcctgggtctctacctcatccgtaggtgtggccctgatggtgtggcaggctctggactcctaaagctctggagcgaatttaagattttattcatgtgcatggcatagaagatgaattcttccacttccaccatgagtgaagagcctgacgctctatcggtagttaaccagttacgggatctagcagcagatccgttaaacagaagagccatcgtccaggatcagggatgtctgcctggccttattttatttatggaccatcccaaccctccagtcgtccactccgctttgcttgctcttcgatacttggcagaatgccgtgcaaacagagaaaagatgaaaggagaactgggtatgatgttgagcttacaaaatgttatacagaaaactacaactccaggagaaacaaaacttctggcctctgaaatctatgacattcttcagtcctccaatatggcagatggtgatagttttaatgagatgaattcacgtcgaaggaaagctcaattttttctgggaactacaaacaaacgtgccaaaacagtggttttgcatatagatggccttgatgatacgtctcggagaaatctatgtgaagaggctttgttaaaaattaaaggtgttattagctttacttttcaaatggctgttcaaaggtgtgtggtgcgaatccgttcagatttgaaagctgaggctttggcatcagcaatagcatcaaccaaggttatgaaagctcagcaagttgtgaaaagtgaaagtggagaagagatgttggtcccattccaagatactcctgtggaagttgaacagaacacagagctacctgactacctgcctgaggatgagagtcccacaaaggaacaggacaaagcggtgtcccgggtcggctcacacccagaaggtggagctagctggcttagcacagctgcaaactttttatccagatcattttattggtgacttcacttttgggctcaaggactgtgtgaaccaacaaggggccagttttccattgttgtggtgaactgtcaagtgcaatttgcaataagttatcatgaaaagtttttagattacacgatcgcatatgctgcatttcacattttattggacattttaccccactgagtggtaaaaaggacagaggctacagatggagttgctttgtttatgaaagtattttggtttgttttctttcatttaattgcctcatatttaaaaaccatgggtccactgttaaaaccacatgtgtatgtgcagctttacattttattttacgtgaagcatgtgattaggaaaactcattttcttttcaagcctcaggacctacctgaagagaagttttcttgtagctcaagttgtgcatgaattactgaatattttactgtgcttttcttcatgaagggtacatgctttgtactcttcactgaaagctgaaaacatttcttgttaccctcttttgtgcctttttattttgccaaccgtgtttatagaaaggacattactaatgacattttgcagattaaaaacattcatttgaacacagtagtcccctagaaaaacaactctacaaaaattttgcagccttattcattataattttgataaaattaacacaaaatcagtcaagaaggaaacatgtatattagtgaagtgtttttggagactgtttgaatgtgaccaaatgtggttctagttgacttcttttcactttggcttatatcaattcttgagagttaatgtgatcatgatattgcaaacaactataaatggtctctaggccttactttgtgattatacgttatctccggctagaaaaaaataatggtagtaaagaaactgacaaactgaaaataagaaaacaaaaatcaaatgcctataataccataatgccagtttggtatagagtccaactttaaaacatgaattgctcgacagagttctattcagtaggtgtttccttgtattgtcttttgtgaatttattatgaaaatgctgcgttgtgttgaatgaaaaagacccaaattactgcttatgaagaaataaagccagcattgatcactt

SEQ ID NO: 187 - DNA, 2414 bp, Homo sapiens
gaaatctgtacgaactattcaggctgcttttagaggcatgaaagttagacaaaaattgaaaaatgtatcagaggaaaagatggcagccattgttaaccaatctgcactctgctgttacagaagcaaaactcagtatgaagctgttcaaagtgaaggtgttatgattcaagagtggtataaagcttctggccttgcttgttcacaggaagcagagtatcattctcaaagtagggctgcagtaacaattcaaaaagctttttgtagaatggtcacaagaaaactggaaacacagaaatgtgctgccctacggattcagttcttccttcagatggctgtgtatcggagaagatttgttcagcagaaaagagctgctatcactttacagcattattttaggacgtggcaaaccagaaaacagtttttactatatagaaaagcagcagtggttttacaaaatcactacagagcatttctgtctgcaaaacatcaaagacaagtctatttacagatcagaagcagtgttatcattattcaagctagaagtaaaggatttatacagaaacggaagtttcaggaaattaaaaatagcaccataaaaattcaggctatgtggaggagatatagagccaagaaatatttatgtaaagtgaaagctgcctgcaagattcaagcctggtatagatgttggagagcacacaaagaatatctagctgtattaaaagctgttaaaattattcaaggttgcttctataccaaactagagagaacacggtttttgaatgtgagagcatcagcaattatcattcagagaaaatggagagctatacttcctgcaaagatagctcatgaacacttcttaatgataaaaagacatcgagctgcttgtttgatccaagcacattatagaggatataaaggaaggcaggtctctcttcggcagaaatctgctgctttgatcatacaaaaatatatacgagccagggaggctggaaagcatgaaaggataaaatatattgaatttaaaaaatctacagttatcctacaagcactggtgcgtggttggctagtacgaaaaagatttttagaacagagagccaaaattcgacttcttcacttcactgcagctgcatattatcacctgaatgctgttagaattcaaagagcctataaactttacctggctgtgaagaatgctaacaagcaggttaattcagtcatctgtattcagagatggtttcgagcaagattacaagaaaagagatttattcagaaatatcatagcatcaaaaagattgagcatgaaggtcaagaatgtctgagccagcgaaatagggctgcatcagtaatacagaaagcagtgcgccattttctcctccgtaaaaagcaggaaaaattcactagtggaatcattaaaattcaggcattatggagaggctattcttggaggaagaaaaatgattgtacaaaaattaaagctatacgactaagtcttcaagttgttaatagggagattcgagaagaaaacaaactctacaaaagaactgcacttgcacttcattaccttttgacatataagcacctttctgccattcttgaggccttaaaacacctagaggtagttactagattgtctccactttgttgtgagaacatggcccagagtggagcaatttctaaaatatttgttttgatccgaagttgtaatcgcagtattccttgtatggaagtcatcagatatgctgtgcaagtcttgcttaatgtatctaagtatgagaaaactacttcagcagtttatgatgtagaaaattgtatagatatactattggagcttttgcagatataccgagaaaagcctggtaataaagttgcagacaaaggcggaagcatttttacaaaaacttgttgtttgttggctattttactgaagacaacaaatagagcctctgatgtacgaagtaggtccaaagttgttgaccgtatttacagtctctacaaacttacagctcataaacataaaatgaatactgaaagaatactttacaagcaaaagaagaattcttctataagcattccttttatcccagaaacacctgtaaggaccagaatagtttcaagacttaagccagattgggttttgagaagagataacatggaagaaatcacaaatcccctgcaagctattcaaatggtgatggatacgcttggcattccttattagtaaatgtaaacattttcagtatgtatagtgtaaagaaatattaaagccaatcatgagtacgtaaagtgatttttgctctctgtgtacaacttttaaaatctgactttgttttaaaaaaacataaactgttcattacattcttcatttttatcatttatagttttatgcatgtaataaactaatatgtcataagatg

SEQ ID NO: 188 - DNA, 2485 bp, Homo sapiens
aaaaaaaaaaaaaaaaccggctcgcggcgcgtggaggctgctcccagccgcgcgcgagtcagactcgggtgggggtcccggcggcggtagcggcggcggcggtgcgagcatgtcgtggctcttcggcattaacaagggccccaagggtgaaggcgcggggccgccgccgcctttgccgcccgcgcagcccggggccgagggcggcggggaccgcggcttgggagaccggccggcgcccaaggacaaatggagcaacttcgaccccaccggcctggagcgcgccgccaaggcggcgcgcgagctggagcactcgcgttatgccaaggacgccctgaatctggcacagatgcaggagcagacgctgcagttggagcaacagtccaagctcaaagagtatgaggccgccgtggagcagctcaagagcgagcagatccgggcgcaggctgaggagaggaggaagaccctgagcgaggagacccggcagcaccaggccagggcccagtatcaagacaagctggcccggcagcgctacgaggaccaactgaagcagcagcaacttctcaatgaggagaatttacggaagcaggaggagtccgtgcagaagcaggaagccatgcggcgagccaccgtggagcgggagatggagctgcggcacaagaatgagatgctgcgagtggaggccgaggcccgggcgcgcgccaaggccgagcgggagaatgcagacatcatccgcgagcagatccgcctgaaggcggccgagcaccgtcagaccgtcttggagtccatcaggacggctggcaccttgtttggggaaggattccgtgcctttgtgacagactgggacaaagtgacagccacggtggctgggctgacgctgctggctgttggggtctactcagccaagaatgccacgcttgtcgccggccgcttcatcgaggctcggctggggaagccgtccctagtgagggagacgtcccgcatcacggtgcttgaggcgctgcggcaccccatccaggtcagccggcggctcctcagtcgaccccaggacgcgctggagggtgttgtgctcagtcccagcctggaagcacgggtgcgcgacatcgccatagcaacaaggaacaccaagaagaaccgcagcctgtacaggaacatcctgatgtacgggccaccaggcaccgggaagacgctgtttgccaagaaactcgccctgcactcaggcatggactacgccatcatgacaggcggggacgtggcccccatggggcgggaaggcgtgaccgccatgcacaagctctttgactgggccaataccagccggcgcggcctcctgctctttgtggatgaagcggacgccttccttcggaagcgagccaccgagaagataagcgaggacctcagggccacactgaacgccttcctgtaccgcacgggccagcacagcaacaagttcatgctggtcctggccagcaaccaaccagagcagttcgactgggccatcaatgaccgcatcaatgagatggtccacttcgacctgccagggcaggaggaacgggagcgcctggtgagaatgtattttgacaagtatgttcttaagccggccacagaaggaaagcagcgcctgaagctggcccagtttgactacgggaggaagtgctcggaggtcgctcggctgacggagggcatgtcgggccgggagatcgctcagctggccgtgtcctggcaggccacggcgtatgcctccgaggacggggtcctgaccgaggccatgatggacacccgcgtgcaagatgctgtccagcagcaccagcagaagatgtgctggctgaaggcggaagggcctgggcgtggggacgagccttccccatcctgagtccacagggagatccacagctcacggagcctggccgcggacccctcccacccctgccttgccggcccctgcacatttaggatatgctcctgggtggggactgggctgtgcccagggcctctgtcccccaggatgtcttgtggtgcgggtcggccgttctgccccccagggcaccccctgttgtaggcactggctagggaggggcaggcctccttcctgcccctcgagacactcttgggagatgcattttccgtctggctcacagggggagggtgaggctttgcaccccagcccctgcccaggccactgtgagggtgggtgctggctgaccccccggggcagcaggagccaggcaggtgatgtctttgttctcggctcccacagcagagccaggtgagggggcgcctgccagggccagacccaggtggggcagcctgaaccctgcttccccctgtggccggcatgccccgatctttcacacactggtgaccctgagagaggagggaggagggaacctggcgggggtgtctgaggccgcactgtcagctggccggtccaagcctgtggctggagctggggtctgtttacctaataaagtcccacaggtgcctcatt

SEQ ID NO: 189 - DNA, 1720 bp, Homo sapiens
gactgcagatgaaattagtaactggtggggtcgtggggtgtgaatggtgggcgggagcagctatgtcagttggtgtgtttctgcttatgttagggtaattgggcacggcctttgtgtaactggtgaatatctctgaacctgggcatgaaacagagagatgtcctaactctgggtgagaggaatcctcatttttctctgccctctcactgtggcatcctaagaaaaaagttttgggttcctgcagcatgaaggagagctctgctcccagaatttgggagctccagatttcttccagggtgtggaggcatcaatatatcagtctgggaaaggggttcctgggccactccaggagctgagttgggtggaaggtgctgagagtgtgggtgggggccacttctgagcacccatgtggcacccactgctggtccctgtttgtggctgggcactcaggaaaatgtttttggtgctaagagtaaaaagccaaccaacaaacacatctcttttttctgtctattcactggaaagtaaaagcagtctgggcgcaggctggggacccagatggaattcaaacttatgcctgctctcaaggtgctcacggttgctgataaacagctggataaaatgaagagtctatgagtgagggatgcagagccagggaaggctggtggagtgatgccaccagcacaggggtatgagtttgcagctgccaaggggccaagggatgagctggggccctccttcccaatggcatctccccctggtctggaactgaagacactgagcaatggtccccaagccccaaggagatcagctcccctgggcccagtggccccaaccagggagggtgtggagaatgcctgcttctcctcagaggagcatgagacccatttccagaaccctgggaacacgagactgggcagctcacccagtccccctgggggtgtctcctcactgccccgatcccagcgggatgatctgtcccttcattcagaggaggggccagccctggagcccgtgagccgcccggtggattatggctttgtttccgccctcgttttcctggtgagtgggattcttctggtggtgacagcatacgccatcccccgtgaggctcgagtcaatccggacacagtgacagcgcgggagatggaacgactggagatgtactacgcccgcctaggctcccacctggacaggtgcatcatcgcaggcctcgggctgctcacggtgggcggcatgctcttgtcggtgctgctcatggtctccctgtgcaagggcgagctgtaccgccggaggaccttcgtccccggcaagggctccaggaagacctacggctccattaacctgcgcatgagacagctcaatggggatgggggccaggccctggtggagaatgaagttgtccaggtctcagagactagccacaccctccagaggtcttaagaactagcccaccttatctggctgctttagctccagtgctacaaggtccaccccctgctcccgcccacctgacccctgccaaggccctggggttttaaactgagctcacatagggccttgtggaagaagtactgggtgctggagggagagctcggggcccagcccatgccccacacgggcaagcagcccactgatctgttttgtagctgaggttttgcatacggttttgtttggaggatggcttctgctgctaaaaatacaaaagtttggaaaccgc

SEQ ID NO: 190 - DNA, 3224 bp, Homo sapiens
gtcccacatcccgcatccggcatcccagcggccgggcatgtagcagcggcagcaacggcggaatatgggcgggaaccactcccacaagccccccgtgtttgacgagaatgaggaagtcaactttgaccattttcagattctgcgggccattggtaaagggagttttggaaaggtatgcatcgtgcagaagcgagacactaagaaaatgtatgcaatgaagtacatgaacaagcagaagtgcatcgagagggatgaggttcggaatgttttccgggagctgcagatcatgcaagggctggagcaccccttcctggtcaatctgtggtactccttccaggatgaggaggacatgttcatggtggtggacctgctcctgggaggcgacctgcgctaccatctgcagcagaatgtgcatttcacagaggggactgtgaaactctacatctgtgagctggcactggccctggagtatcttcagaggtaccacatcatccacagagacatcaagccagacaatatcctgctggatgaacacggacatgttcacattacagacttcaacatagcgacggtagtgaaaggagcagaaagggcttcctccatggctggcaccaagccctacatggctccagaagtattccaggtgtacatggacagaggccccggatactcgtaccctgtcgactggtggtccctgggcatcacagcctatgagctgctgcggggctggaggccgtacgaaatccactcggtcacgcccatcgatgaaatcctcaacatgttcaaggtggagcgtgtccactactcctccacgtggtgcaaggggatggtggccctgctgaggaagctcctgaccaaggatcctgagagccgcgtgtccagccttcatgacatacagagcgtgccctacttggccgacatgaactgggacgcggtgttcaagaaggcactgatgcccggctttgtgcccaataaagggaggttgaactgcgatcccacatttgagcttgaagagatgattctagaatccaagccacttcacaaaaagaagaagcgattggcaaagaacagatccagggatggcacaaaggacagctgcccgctgaatggacacctgcagcactgtttggagactgtccgggaggaattcatcatattcaacagagagaagctcaggaggcagcagggacagggcagccagctcttggacaccgacagccgagggggaggccaggcccaaagcaagctccaggacgggtgcaacaacaacctcctcacccacacctgcacccgtggctgcagcagctgagcccacacttgttgctgctcaacaggactgcactcgtctctgccctgcccacccagagcccctctttgtgccctgatggtccctgtctcacccctgaaaacatcagatgcagaaaaagccctggacttggagctgggaagcctgggttctggtcccatctccatgactgattcacgtgtgacctcagacaagtcacgccctctctgtgcctccgttttctgcatctgccaaaggggttaaacacttctgccccacttcaaattacaagattatggggagaacccaattaggtaggaaacatgaaaaacctttgatatttataaaatcatttttacgtgcaaaatataaccttaatatttgaagtgacccccattccccaaagcaatcaaaccgtcatgactttgcaatttggcacatcctagcttgttagagggcacttccgaaaaacacagccctgacagcaaaataaaggtctgatatgttggccccttctatggaaacaacgctgccaaatcctggagcaaaacctgaagtgtcttcatgtgcattctctggcaggccacagtcctgagcttgtaagatggtgcagcatgcagaccagacttgtccccaaggtctcagcgctgcggtctcactcctcccctcatttaagaagactatccttaccttttagtttcagcagtcctcaccaccaccatatccccagtgctgggatggcacacaggtgtccattcagatgagagttgggtcgctgagcattggttactcctgcagagtgtaatcagcaccccatccaactggcccgaaagcccagacctgcagcagaactctccaactctctatcagctttcagggttttctctcctgggaagggtgtaaaatcagcttgtcagattcttcttacagagagtatccaatcggtattggtggagcggctccctatttatacaataggaagcatgggtgcttagaaagtttatttcaggaggaaaatgggttcacacaaaaagcaaactacattctgatctgctcagggagaagcttgcctttgaactggaagatgttgggatgagcagggaaagcttagactttggagtcaggtttgtgttcagaatccagccctgctggctactaactaactgggagaccttaggcaaagcatgcaatcgctctgaatggcagtttcctcatttttaaacagggataataaaactaatattgcaggggagttacagggttaaataagatcctgtgtgtaaccccaagcattggatgactcatagaatggccttttttgtcagcataatcgtcatcattatttagatactttcttccttcactcacccagcaggtcagttttctgtgcaaacaaacctgtttaggattcttccaaatgttcttcctggggtctttgatatttgtttgttacatcctgctgaagttcgactgtgtttttattttttcatccaacttccatttttcactttttacatgattactcaatccttggggctgtccatgtcatctcttagatttcttaaaagacattttaatgtatggttaggttttatatttttattttttaaaaaagaaatagtcagtgttttcctcctttcaaccgagactatttctggattgtgtgctcctcgtcagttgacttgttttgcacacttttctttacttcatgtccccatcaacaaccgtcctgctccccacctcccccaggaaataaggggcctgctcctctccctactgtgaccctggaggctcttaagatgatgatggttttttttattgggctgagttcacgaattaggggcaggagctggaagtcgccctaggaacaccagatttcctggttctgttcaagttggcatttcttgtttggaataaactatttcttggacattccttc

SEQ ID NO: 191 - DNA, 1704 bp, Homo sapiens
atgacatttgcaatgtgaccatcagtgacctgtacgcagggatgctgcactccatgagccggctgttgagcacaaagccatcaagcatcatctccaccaaaacgttcatcatgcaaaactggaactccaggaggaggcacagatataagagcaggatgaacaaaacatattgcaaaggagccagacgttctcagaggagctccaaggagaacttcataccctgctctgagcctgtgaaagggacaggggcattaagagattgcaagaacgtattagatgtttcttgccgtaagacaggtttaaaattggaaaaagcttttcttgaagtcaacagaccccaaatccataagttagatccaagttggaaggagcgcaaagtgacaccctcgaagtattcttccttgatttacttcgactccagtgcaacatataatcttgatgaggaaaatagatttaggacattaaaatggttaatttctcctgtaaaaatagtttccagaccaacaatacgacagggccatggagagaaccgtcagagggagattgaaatctgatttgatcagcttcatcgggaatattgcctgagtcccaggaaccagcctcgccggatgtgcctcccggactcctgggccatgaacatgtacagagggggtcctgcgagtcctggtggccttcagggcttagaaacccgcaggctgagtttaccttccagcaaagcaaaagcaaaaagtttaagtgaggcttttgaaaacctaggcaaaagatctctggaagcaggtaggtgcctgcccaagagcgattcatcttcatcacttccaaagaccaaccccacacacagcgcaactcgcccgcagcagacatctgaccttcacgttcagggaaatagttctggaatatttagaaagtcagtgtcacccagcaaaactctttcagtcccagataaagaagtgccaggccacggaaggaatcgttacgatgaaattaaagaagaatttgacaagcttcatcaaaagtattgcctcaaatctcctgggcagatgacagtgcctttatgtattggagtgtctacagataaagcaagtatggaagttcgatatcaaacagaaggcttcttaggaaaattaaatccagaccctcacttccagggtttccagaagttgccatcatcacccctggggtgcagaaaaagtctactgggctcaactgcaattgaggctccttcatctacatgtgttgctcgtgccatcacgagggatggcacgagggaccatcagttccctgcaaaaagacccaggctatcagaaccccagggctccggacgccagggcaattccctgggtgcctcagatggggtggacaacaccgtcagaccgggagaccagggcagctcttcacagcccaactcagaagagagaggagagaacacgtcttacaggatggaagagaaaagtgatttcatgctagaaaaattggaaactaaaagtgtgtagctaggttatttcggagtgttatttatcttcccacttgctctctgtttgtatttttgttttgtttttgattcttgagactgtgaggacttggttgacttctctgcccttaaagtaaatattagtgaaattggttccatcagagataacctcgagttcttggtgtagaaattatgtgaataaagttgctcaattagaaaaaaaaaaaaaaaaaaaa

SEQ ID NO: 192 - DNA, 703 bp, Homo sapiens
agtggcgccagggatttgaaccgcgctgacgaagtttggtgatccatcttccgagtatcgccgggatttcgaatcgcgatgatcatcccctctctagaggagctggactccctcaagtacagtgacctgcagaacttagccaagagtctgggtctccgggccaacctgagggcaaccaagttgttaaaagccttgaaaggctacattaaacatgaggcaagaaaaggaaatgagaatcaggatgaaagtcaaacttctgcatcctcttgtgatgagactgagatacagatcagcaaccaggaagaagctgagagacagccacttggccatgtcaccaaaacaaggagaaggtgcaagactgtccgtgtggaccctgactcacagcagaatcattcagagataaaaataagtaatcccactgaattccagaatcatgaaaagcaggaaagccaggatctcagagctactgcaaaagttccttctccaccagacgagcaccaagaagctgagaatgctgtttcctcaggtaacagagattcaaaggtaccttcagaaggaaagaaatctctctacacagatgagtcatccaaacctgggaaaaaataaaagaactgcaatcactactccaaactttaagaagcttcatgaagctcattttaaggaaatggagtccattgatcaatatattgaggagaaaaaaaaa

SEQ ID NO: 193 - DNA, 1005 bp, Homo sapiens
aatttcggcacgggggggaggcacagtgagtccactggggcacggcagcgtctaagccacaagccgactgacataagccaggtcctaacggagcctatgtgtaagtccactactggtgcaaggttgcacacttctaagaagagcggcgtggggggctcggcgaccttcgcttcagtcgctcccccgtgcagtcccctgtgcccaagacacagcctgatgcttgtgctccggtgggcggacttggaggcggcgggaactgcaattggtggctttgaagggcggcgagcgggaacagctcttgaggagtgagactgcaggagatgtgggccgtgccaaagagatggatgagactgttgctgagttcatcaagaggaccatcttgaaaatccccatgaatgaactgacaacaatcctgaaggcctgggattttttgtctgaaaatcaactgcagactgtaaatttccgacagagaaaggaatctgtagttcagcacttgatccatctgtgtgaggaaaagcgtgcaagtatcagtgatgctgccctgttagacatcatttatatgcaatttcatcagcaccagaaagtttgggatgtttttcagatgagtaaaggaccaggtgaagatgttgacctttttgatatgaaacaatttaaaaattcgttcaagaaaattcttcagagagcattaaaaaatgtgacagtcagcttcagagaaactgaggagaatgcagtctggattcgaattgcctggggaacacagtacacaaagccaaaccagtacaaacctacctacgtggtgtactactcccagactccgtacgccttcacgtcctcctccatgctgaggcgcaatacaccgcttctgggtcaggagttagaagctactgggaaaatctacctccgacaagaggagatcattttagatattaccgaaatgaagaaagcttgcaattagtgaacatgaaaggaaaataaaaattcctcacagtcaaaaaaaaaaaaaaa

SEQ ID NO: 194 - DNA, 1483 bp, Homo sapiens
cttagtggtgtcggggtctagtggacagagaagactcttggccaggcagatggcttctcggtggcagaacatggggacctccgtgcgccggagatctctccagcaccaggagcagctggaggacagcaaggagctgcagcctgtggtcagccatcaggagacctctgtaggggccctggggtccctgtgcagacagttccaaaggaggctgcccctgagaaccgtcaacctcaacctccgcgcagggccctcctggaaacgcctggaaaccccagagccaggtcagcagggcctccaggctgcagctcgctcagctaagagtgctttgggtgccgtgtcccagagaatccaggagtcctgccaaagtggcaccaagtggctggtggagacccaggtgaaggccaggaggcggaagagaggagcacagaagggcagtggatccccaactcacagcctgagccagaagagcacccggctgtctggagccgcccctgcccactcagccgcagacccctgggagaaggagcatcaccgcctctctgtccggatgggctcacatgcccacccattacggcgatcaaggcgggaggctgccttccggagcccctactcctcaacagagcccctctgctctcccagcgagtctgacagtgacctagagcctgtgggggcgggaattcagcatctccagaagctgtcccaagagctagatgaagccattatggcggaagagagtggtgacatcgtctctctcattcatgactgaggaagtgcctgcaggaaacaagccctgtctgaccgccaaggcttcatactcaaggatgtctatgcttccccgtgtgcttcctggaaaaaacccccgggagtcgtcagtacccctgggccactgctaacaagcacctaacaaggggcccagagccccctgctccagccacatctggacccatcagtgactgcctgccatagcctgagagtgtcttggggagaccttgcagagggggagaattgttccttctgctttcctaggggactcttgagcttagaaactcatcgtacacttgaccttgagccttctatttgcctcatctataacatgaagtgctagcatcagatatttgagagctcttagctctgtacccgggtgcctggtttttggggagtcatccgcagagtcactcacccactgtgtttctggtgccaaggctcttgagggccccactctcatccctcctttccctaccagggactcggaggaaggcataggagatatttccaggcttacgaccctgggctcacgggtacctatttatatgctcagtgcagagcactgtggatgtgccaggaggggtagccctgttcaagagcaatttctgccctttgtaaattatttaagaaacctgctttgtcattttattagaaagaaaccagcatgtgactttcctagataacactgctttctcataataaagactatttgcatttg

SEQ ID NO: 195 - DNA, 2528 bp, Homo sapiens
cccaaaggtaggctcaggctccgacggtggccggcgggggtcacgaggcttcgtagtggaggaacgggtttggcgtgtgggacgcagctgcctctgtactggggagtcacggagtggccgggctccagggacatggcggcggcctctgcggtgtcggtgctgctggtggcggcggagaggaaccggtggcatcgtctcccgagcctgctcctgccgccgaggacatgggtgtggaggcaaagaaccatgaagtacacaacagccacaggaagaaacattaccaaggtcctcattgcaaacagaggagaaattgcctgcagggtgatgcgcacagccaaaaaactgggtgtacagactgtggcggtttatagtgaggctgacagaaattccatgcatgtagatatggcagatgaagcatattccatcggccccgctccctcccagcagagctacctatctatggagaaaatcattcaagtggccaagacctctgctgcacaggctatccatccaggatgcggttttctttcagaaaacatggaatttgctgaactttgtaagcaagaaggaattatttttataggccctcctccatctgcaattagagacatgggtataaagagcacatccaaatccataatggctgctgctggagtacctgttgtggagggttatcatggtgaggaccaatcagaccagtgcctgaaggaacacgccaggagaattggctatcctgtcatgattaaagccgtccggggtggaggaggaaaaggaatgaggattgttagatcagaacaagaatttcaagaacagttagagtcagcacggagagaagctaagaagtctttcaatgatgatgctatgctgatcgagaagtttgtagacacaccgaggcatgtagaagtccaggtgtttggtgatcaccatggcaatgctgtgtacttgtttgaaagagactgtagtgtgcagaggcgacatcagaagatcattgaggaggccccagcgcctggtattaaatctgaagtaagaaaaaagctgggagaagctgcagtcagagctgctaaagctgtaaattatgttggagcagggactgtggagtttattatggactcaaaacataatttctgtttcatggagatgaatacaaggctgcaagtggaacatcctgttactgagatgatcacaggaactgacttggtggagtggcagcttagaattgcagcaggagagaagattcctttgagccaggaagaaataactctgcagggccatgccttcgaagctagaatatatgcagaagatcctagcaataacttcatgcctgtggcaggcccattagtgcacctctctactcctcgagcagacccttccaccaggattgaaactggagtacggcaaggagacgaagtttccgtgcattatgaccccatgattgcgaagctggtcgtgtgggcagcagatcgccaggcggcattgacaaaactgaggtacagccttcgtcagtacaatattgttggactgcccaccaacattgacttcttactcaacctgtctggccacccagagtttgaagctgggaacgtgcacactgatttcatccctcaacaccacaaacagttgttgctcagtcggaaggctgcagccaaagagtctttatgccaggcagccctgggtctcatcctcaaggagaaagccatgaccgacactttcactcttcaggcacatgatcaattctctccattttcgtctagcagtggaagaagactgaatatctcgtataccagaaacatgactcttaaagatggtaaaaacaatgtagccatagctgtaacgtataaccatgatgggtcttatagcatgcagattgaagataaaactttccaagtccttggtaatctttacagcgagggagactgcacttacctgaaatgttctgttaatggagttgctagtaaagcgaagctgattatcctggaaaacactatttacctattttccaaggaaggaagtattgagattgacattccagtccccaaatacttatcttctgtgagctcacaagaaactcagggcggccccttagctcctatgactggaaccattgaaaaggtgtttgtcaaagctggagacaaagtgaaagcgggagattccctcatggttatgatcgccatgaagatggagcataccataaagtctccaaaggatggcacagtaaagaaagtgttctacagagaaggtgctcaggccaacagacacactcctttagtcgagtttgaggaggaagaatcagacaaaagggaatcggaataaactccagcaaggaaatggccagttaagtagtgtcttctctctccaccaaaaagaggaagtgcctccagcttttctgggggtctcataaagagcagttttactaaatgattgtatgcttatgctgaacacctttcatattggagaatcatgcatttgggtcactaattatctcaaaatatttcatactaataaagttgaattattttttattggaagcc

SEQ ID NO: 196 - DNA, 716 bp, Homo sapiens
acggtggagcggtggagggcgtcactgggtttcggcgtctggcaagcggttcagctgtctgctccctagcagccggccttcgggtcgggcgtctccgcggctactgccgcttcagttctcccggtgtggccacgagtcgggttgcactgctgtgatccatcctcatctcctaaagatgcatcctgacttatctccacacttgcacactgaagaatgcaacgtcttgattaacttgcttaaggaatgtcacaaaaatcacaacattctgaaattttttggttattgtaatgatgttgatcgggagttgagaaaatgcctgaagaatgagtacgtagaaaacaggaccaagagcagggagcatggcattgcaatgcgaaagaaactttttaatcctccagaggaatccgaaaaataaattgtattttcactcgatgccttggctgagagaagacctaaagactctgggttgatacctgaaagaatcctgtcttatttggtctccataatcctttgaatggaaagtgacctgtgagagattgaaccatggagaaatatgaaaaccctggattctgagtatttgttgggcagggcgtttagtactgtctcccctttaccagcaaacctgacttcaccatgtttattccctttgcctacaaccagttaatatctgagtaacttatctccttcaataaaataatttaaataaaaaaaaaaaa

SEQ ID NO: 197 - DNA, 1536 bp, Homo sapiens
cggcagccgggcaggccggcctgacctcgacctccgccgtgcgggcccgaccggtgagtccagcccggcagtcgcaggacccggccgccagcctctccctccacctctccctgcccccagcgccaggcgcgggctgcgctcggtggcggcggcggggccctcaggcggccatggcggcaggcgccggggccgggtccgcgccgcgctggctgagggcgctgagcgagccgctgagcgcggcgcagctgcggcgactggaggagcaccgctacagcgcggcgggcgtctcgctgctcgagccgccgctgcagctctactggacctggctgctccagtggatcccgctctggatggcccccaactccatcaccctgctggggctcgccgtcaacgtggtcaccacgctcgtgctcatctcctactgtcccacggccaccgaagaggcaccatactggacataccttttatgtgcactgggactttttatttaccagtcactggatgctattgatgggaaacaagccagaagaacaaactcttgttcccctttaggggagctctttgaccatggctgtgactctctttccacagtatttatggcagtgggagcttcaattgccgctcgcttaggaacttatcctgactggtttttttcctgctcttttattgggatgtttgtgttttattgcgctcattggcagacttatgtttcaggcatgttgagatttggaaaagtggatgtaactgaaattcagatagctttagtgattgtctttgtgttgtctgcatttggaggagcaacaatgtgggactatacgattcctattctagaaataaaattgaagatccttccagttcttggatttctaggtggagtaatattttcctgttcaaattatttccatgttatcctccatggtggtgttggcaagaatggatccactatagcaggcaccagtgtcttgtcacctggactccacataggactaattattatactggcaataatgatctataaaaagtcagcaactgatgtgtttgaaaagcatccttgtctttatatcctaatgtttggatgtgtctttgctaaagtctcacaaaaattagtggtagctcacatgaccaaaagtgaactatatcttcaagacactgtctttttggggccaggtcttttgtttttagaccagtactttaataattttatagacgaatatgttgttctatggatggcaatggtgatttcttcatttgatatggtgatatactttagtgctttgtgcctgcaaatttcaagacaccttcatctaaatatattcaagactgcatgtcatcaagcacctgaacaggttcaagttctttcttcaaagagtcatcagaataacatggattgaagagacttccgaacacttgctatctcttgctgctgctgtttcatggaaggagatattaaacatttgtttaatttttatttaagtgttatacctatttcagcaaataaaatatttcattgcttaaaaaaaaaaaaaaaaaaaaaaa

SEQ ID NO: 198 - DNA, 867 bp, Homo sapiens
cgtttcagcgtggcggcgctggtgctggcgttggccctggaggacggccccgagtgatggctggcgcctgcctcccgggtgtctcccgggtacagatggagtcgtcccgcggccgccggcggcaaggtcggcagctgcgaggccaagagagaccccaggacacacacagctgcctcccggtgcgagaagaagaccccggcttgagagtgagatggcgtttaatgattgcttcagtttgaactaccctggcaacccctgcccaggggacttgatcgaagtgttccgtcctggctatcagcactgggccctgtacttgggtgatggttacgttatcaacatagcacctgtagatggcattcctgcgtcctttacaagcgccaagtctgtattcagcagtaaggccctggtgaaaatgcagctcttgaaggatgttgtgggaaatgacacatacagaataaacaataaatacgatgaaacgtacccccctctccctgtggaagaaatcataaagcggtcagagtttgtaattggacaggaggtggcctataacttacttgtcaacaactgtgaacattttgtgacattgcttcgctatggagaaggagtttcagagcaggccaaccgagcgataagtaccgttgagtttgtgacagctgctgttggtgtcttctcattcctgggcttgtttccaaaaggacaaagagcaaaatactattaacaatttaccaaagagatattgatattgaaggaatttgggaggaggaaaagaaacctggggtgaatacttattttcagtgcatcattactgttccagattcctatgatggatggcagactctttaataaattgcttactgatattatctt

SEQ ID NO: 199 - DNA, 675 bp, Homo sapiens
atggtagaggacgaactggcacttttcgataaaagcataaatgaattttggaataaattcaaaagtacggacacctcctgtcagatggcgggactaagagatacctacaaggattccatcaaagcatttgcagaaaagctgtctgtgaaattaaaggaagaagaacgaatggttgagatgtttctggaatatcaaaatcagatcagcaggcaaaataagctcattcaagaaaaaaaggataacttgttaaaattgattgctgaagtaaaaggcaaaaagcaggaattggaagtactgactgcaaatatccaggatcttaaggaagaatattctaggaagaaggaaactatttctactgctaataaagcgaatgcagagaggttgaaaaggctgcagaaatctgcagacttgtataaagatcgacttggactagaaattcgaaaaatttatggtgagaaattgcagtttattttcactaatattgaccctaagaatcctgagagcccatttatgttttccttacatctcaatgaagcaagggactatgaagtgtcagatagtgcccctcatcttgagggcctagcagaatttcaagagaatgtaaggaagaccaacaatttttcagcttttcttgccaatgttcggaaagcttttactgccacggtttataattaa

SEQ ID NO: 200 - DNA, 3737 bp, Homo sapiens
ggcgtccgcgcacacctccccgcgccgccgccgccaccgcccgcactccgccgcctctgcccgcaaccgctgagccatccatgggggtcgcgggccgcaaccgtcccggggcggcctgggcggtgctgctgctgctgctgctgctgccgccactgctgctgctggcgggggccgtcccgccgggtcggggccgtgccgcggggccgcaggaggatgtagatgagtgtgcccaagggctagatgactgccatgccgacgccctgtgtcagaacacacccacctcctacaagtgctcctgcaagcctggctaccaaggggaaggcaggcagtgtgaggacatcgatgaatgtggaaatgagctcaatggaggctgtgtccatgactgtttgaatattccaggcaattatcgttgcacttgttttgatggcttcatgttggctcatgacggtcataattgtcttgatgtggacgagtgcctggagaacaatggcggctgccagcatacctgtgtcaacgtcatggggagctatgagtgctgctgcaaggaggggtttttcctgagtgacaatcagcacacctgcattcaccgctcggaagagggcctgagctgcatgaataaggatcacggctgtagtcacatctgcaaggaggccccaaggggcagcgtcgcctgtgagtgcaggcctggttttgagctggccaagaaccagagagactgcatcttgacctgtaaccatgggaacggtgggtgccagcactcctgtgacgatacagccgatggcccagagtgcagctgccatccacagtacaagatgcacacagatgggaggagctgccttgagcgagaggacactgtcctggaggtgacagagagcaacaccacatcagtggtggatggggataaacgggtgaaacggcggctgctcatggaaacgtgtgctgtcaacaatggaggctgtgaccgcacctgtaaggatacttcgacaggtgtccactgcagttgtcctgttggattcactctccagttggatgggaagacatgtaaagatattgatgagtgccagacccgcaatggaggttgtgatcatttctgcaaaaacatcgtgggcagttttgactgcggctgcaagaaaggatttaaattattaacagatgagaagtcttgccaagatgtggatgagtgctctttggataggacctgtgaccacagctgcatcaaccaccctggcacatttgcttgtgcttgcaaccgagggtacaccctgtatggcttcacccactgtggagacaccaatgagtgcagcatcaacaacggaggctgtcagcaggtctgtgtgaacacagtgggcagctatgaatgccagtgccaccctgggtacaagctccactggaataaaaaagactgtgtggaagtgaaggggctcctgcccacaagtgtgtcaccccgtgtgtccctgcactgcggtaagagtggtggaggagacgggtgcttcctcagatgtcactctggcattcacctctcttcagatgtcaccaccatcaggacaagtgtaacctttaagctaaatgaaggcaagtgtagtttgaaaaatgctgagctgtttcccgagggtctgcgaccagcactaccagagaagcacagctcagtaaaagagagcttccgctacgtaaaccttacatgcagctctggcaagcaagtcccaggagcccctggccgaccaagcacccctaaggaaatgtttatcactgttgagtttgagcttgaaactaaccaaaaggaggtgacagcttcttgtgacctgagctgcatcgtaaagcgaaccgagaagcggctccgtaaagccatccgcacgctcagaaaggccgtccacagggagcagtttcacctccagctctcaggcatgaacctcgacgtggctaaaaagcctcccagaacatctgaacgccaggcagagtcctgtggagtgggccagggtcatgcagaaaaccaatgtgtcagttgcagggctgggacctattatgatggagcacgagaacgctgcattttatgtccaaatggaaccttccaaaatgaggaaggacaaatgacttgtgaaccatgcccaagaccaggaaattctggggccctgaagaccccagaagcttggaatatgtctgaatgtggaggtctgtgtcaacctggtgaatattctgcagatggctttgcaccttgccagctctgtgccctgggcacgttccagcctgaagctggtcgaacttcctgcttcccctgtggaggaggccttgccaccaaacatcagggagctacttcctttcaggactgtgaaaccagagttcaatgttcacctggacatttctacaacaccaccactcaccgatgtattcgttgcccagtgggaacataccagcctgaatttggaaaaaataattgtgtttcttgcccaggaaatactacgactgactttgatggctccacaaacataacccagtgtaaaaacagaagatgtggaggggagctgggagatttcactgggtacattgaatccccaaactacccaggcaattacccagccaacaccgagtgtacgtggaccatcaacccaccccccaagcgccgcatcctgatcgtggtccctgagatcttcctgcccatagaggacgactgtggggactatctggtgatgcggaaaacctcttcatccaattctgtgacaacatatgaaacctgccagacctacgaacgccccatcgccttcacctccaggtcaaagaagctgtggattcagttcaagtccaatgaagggaacagcgctagagggttccaggtcccatacgtgacatatgatgaggactaccaggaactcattgaagacatagttcgagatggcaggctctatgcatctgagaaccatcaggaaatacttaaggataagaaacttatcaaggctctgtttgatgtcctggcccatccccagaactatttcaagtacacagcccaggagtcccgagagatgtttccaagatcgttcatccgattgctacgttccaaagtgtccaggtttttgagaccttacaaatgactcagcccacgtgccactcaatacaaatgttctgctatagggttggtgggacagagctgtcttccttctgcatgtcagcacagtcgggtattgctgcctcccgtatcagtgactcattagagttcaatttttatagataatacagatattttggtaaattgaacttggtttttctttcccagcatcgtggatgtagactgagaatggctttgagtggcatcagcttctcactgctgtgggcggatgtcttggatagatcacgggctggctgagctggactttggtcagcctaggtgagactcacctgtccttctggggtcttactcctcctcaaggagtctgtagtggaaaggaggccacagaataagctgcttattctgaaacttcagcttcctctagcccggccctctctaagggagccctctgcactcgtgtgcaggctctgaccaggcagaacaggcaagaggggagggaaggagacccctgcaggctccctccacccaccttgagacctgggaggactcagtttctccacagccttctccagcctgtgtgatacaagtttgatcccaggaacttgagttctaagcagtgctcgtgaaaaaaaaaagcagaaagaattagaaataaataaaaactaagcacttctggagacat

SEQ ID NO: 201 - DNA, 408 bp, Homo sapiens
tttttgtcgtttttggttttttttgagacagcgtcttagtctgtcgccaaggctggagtgcagtggcgcaatcaaagcttgctgcagccttgaactcctgggctcaagcaatcctcttacctcagcaactaggactacaggcacatgccaccacgcttggccttctaatttatttctgtgtcaacaaaataaaactcaggcctaggaatagcttggttcagaaatcacagagggacttagtattccattaatacaaatggaaacattaagttcatcatcagatgataaaaggaaaaaaaaaaacctgatactcatctcaaaagacggcggaaaagacatttggcataaatccaggtacctattattatttccaaatttaaaaacttcttcttttttaaggggtagggg

SEQ ID NO: 202 - DNA, 1496 bp, Homo sapiens
gcacgaggcctgcactttgtcaagtttgccatcgacagtgaccagctccatcagctctgggagaaggaccagctcaacatggccaagaacacctggcccattctgaagggctttcaggaggggcccctcaacttcgctcccaccttcaagtttgatgtgggtaccaacaaatacgataccagtgccaagaaacggaagccagcttggacagaccgtatcctatggaaggtcaaggctccaggtgggggtcccagcccctcaggacggaagagccaccgactccaggtgacgcagcacagctaccgcagccacatggaatacacagtcagcgaccacaagcctgtggctgcccagttcctcctgcagtttgccttcagggacgacatgccactggtgcggctggaggtggcagatgagtgggtgcggcccgagcaggcggtggtgaggtaccgcatggaaacagtgttcgcccgcagctcctgggactggatcggcttataccgggtgggtttccgccattgcaaggactatgtggcttatgtctgggccaaacatgaagatgtggatgggaatacctaccaggtaacattcagtgaggaatcactgcccaagggccatggagacttcatcctgggctactatagtcacaaccacagcatcctcatcggcatcactgaacccttccagatctcgctgccttcctcggagttggccagcagcagcacagacagctcaggcaccagctcagagggagaggatgacagcacactggagctccttgcacccaagtcccgcagccccagtcctggcaagtccaagcgacaccgcagccgcagcccgggactggccaggttccctgggcttgccctacggccctcatcccgtgaacgccgtggtgccagccgtagcccctcaccccagagccgccgcctgtcccgagtggctcctgacaggagcagtaatggcagcagccggggcagtagtgaagaggggccctctgggttgcctggcccctgggccttcccaccagctgtgcctcgaagcctgggcctgttgcccgccttgcgcctagagactgtagaccctggtggtggtggctcctggggacctgatcgggaggccctggcgcccaacagcctgtctcctagtccccagggccatcgggggctggaggaagggggcctggggccctgagggtggggtaggcagatgggccaaggtgaccaccattctgcctcaatcttttgcaagcccacctgcctctctcctgctgctcctccagctgtatctgcacctgcctctctgtcctggccaggggtggacaactggggtcccccaaaactcagtcctggcacctcaactgtgacaatcagcaaagccccacccaggcccccatctgggatgatgggagagctctggcagatgtcccaatcctggaggtcatccattaggaattaaattctccagcctcaaaaaaaaaaaaaaaaaaaaaaaaa

SEQ ID NO: 203 - DNA, 1203 bp, Homo sapiens
gaatctactcattggctagaacatattaagcttattcttgcaggggctcttaggattgctgacaaggtagagtcagggaagacgtctgtggtagtgcattgcagtgatggttgggatcgcacagctcagctcacttcccttgccatgctcatgttggatggatactatcgaaccatccgaggatttgaagtccttgtggagaaagaatggctaagttttggacatcgatttcaactaagagttggccatggagataagaaccatgcagatgcagacagatcgcctgtttttcttcaatttattgactgtgtctggcagatgacaagacagtttcctaccgcatttgaattcaatgagtattttctcattaccattttggaccacctatacagctgcttattcggaacattcctctgtaatagtgaacaacagagaggaaaagagaatcttcctaaaaggactgtgtcactgtggtcttacataaacagccagctggaagacttcactaatcctctctatgggagctattccaatcatgtcctttatccagtagccagcatgcgccacctagagctctgggtgggatattacataaggtggaatccacggatgaaaccacaggaacctattcacaacagatacaaagaacttcttgctaaacgagcagagcttcagaaaaaagtagaggaactacagagagagatttctaaccgatcaacctcatcctcagagagagccagctctcctgcacagtgtgtcactcctgtccaaactgttgtataaaggactgtaagatcaggggcatcattgctatacactcttgattacactggcagctctatgagtagaaagtcttcggaatttagaacccatctatgagagaaagttcagtcactttatttattttaaatctctctaggatgagtttagaactgtagcagtgcaggtggcttaagtgaagtaactccatatgtaattacatgattatgatactaatcttttaagtatccaaagaatattaaaatacttcaatcctggattcacagtgggaacaagtttctattaaaaggcaaatgctgttacaaatttttggcatctggtaatattaaaaccattttagaaatacactctgtgctcactgtgcagaggaacatcagttttcaaaccaacactgaaattctgtggcatcacatatattgggcc

SEQ ID NO: 204 - DNA, 1639 bp, Homo sapiens
ccgccccctccggcgtgttcatgcccccggggccccagggagcgccatggcccgcgcacgccaggagggcagctccccggagcccgtagagggcctggcccgcgacggcccgcgccccttcccgctcggccgcctggtgccctcggcagtgtcctgcggcctctgcgagcccggcctggctgccgcccccgccgcccccaccctgctgcccgctgcctacctctgcgcccccaccgccccacccgccgtcaccgccgccctggggggttcccgctggcctgggggtccccgcagccggccccgaggcccgcgcccggacggtcctcagccctcgctctcgctggcggagcagcacctggagtcgcccgtgcccagcgccccgggggctctggcgggcggtcccacccaggcggccccgggagtccgcggggaggaggaacagtgggcccgggagatcggggcccagctgcggcggatggcggacgacctcaacgcacagtacgagcggcggagacaagaggagcagcagcggcaccgcccctcaccctggagggtcctgtacaatctcatcatgggactcctgcccttacccaggggccacagagcccccgagatggagcccaattaggtgcctgcacccgcccggtggacgtcagggactcggggggcaggcccctcccacctcctgacaccctggccagcgcgggggactttctctgcaccatgtagcatactggactcccagccctgcctgtcccgggggcgggccggggcagccactccagccccagcccagcctggggtgcactgactgagatgcggactcctgggtccctggccaagaagccaggagagggacggctgatggactcagcatcggaaggtggcggtgaccgagggggtggggactgagccgcccgcctctgccgcccaccaccatctcaggaaaggctgttgtgctggtgcccgttccagctgcaggggtgacactggggggggggggggctctcctctcggtgctccttcactctgggcctggcctcaggcccctggtgcttccccccctcctcctgggagggggcccgtgaagagcaaatgagccaaacgtgaccactagcctcctggagccagagagtggggctcgtttgccggttgctccagcccggcgcccagccatcttccctgagccagccggcgggtggtgggcatgcctgcctcaccttcatcagggggtggccaggaggggcccagactgtgaatcctgtgctctgcccgtgaccgccccccgccccatcaatcccattgcataggtttagagagagcacgtgtgaccactggcattcatttggggggtgggagattttggctgaagccgccccagccttagtccccagggccaagcgctggggggaagacggggagtcagggagggggggaaatctcggaagagggaggagtctgggagtggggagggatggcccagcctgtaagatactgtatatgcgctgctgtagataccggaatgaattttctgtacatgtttggttaattttttttgtacatgatttttgtatgtttccttttcaataaaatcagattggaacagtggaaaaaaaggccttcgtggcctcgagagatc

SEQ ID NO: 205 - DNA, 2203 bp, Homo sapiens
cggcggccgcgccctggttgggtccccactgctctcgggggcgccatggacgaggccgtgggcgacctgaagcaggcgcttccctgtgtggccgagtcgccaacggtccacgtggaggtgcatcagcgcggcagcagcactgcaaagaaagaagacataaacctgagtgttagaaagctactcaacagacataatattgtgtttggtgattacacatggactgagtttgatgaaccttttttgaccagaaatgtgcagtctgtgtctattattgacacagaattaaaggttaaagactcacagcccatcgatttgagtgcatgcactgttgcacttcacattttccagctgaatgaagatggccccagcagtgaaaatctggaggaagagacagaaaacataattgcagcaaatcactgggttctacctgcagctgaattccatgggctttgggacagcttggtatacgatgtggaagtcaaatcccatctcctcgattatgtgatgacaactttactgttttcagacaagaacgtcaacagcaacctcatcacctggaaccgggtggtgctgctccacggtcctcctggcactggaaaaacatccctgtgtaaagcgttagcccagaaattgacaattagactttcaagcaggtaccgatatggccaattaattgaaataaacagccacagcctcttttctaagtggttttcggaaagtggcaagctggtaaccaagatgtttcagaagattcaggatttgattgatgataaagacgccctggtgttcgtgctgattgatgaggtggagagtctcacagccgcccgaaatgcctgcagggcgggcaccgagccatcagatgccatccgcgtggtcaatgctgtcttgacccaaattgatcagattaaaaggcattccaatgttgtgattctgaccacttctaacatcaccgagaagatcgacgtggccttcgtggacagggctgacatcaagcagtacattgggccaccctctgcagcagccatcttcaaaatctacctctcttgtttggaagaactgatgaagtgtcagatcatataccctcgccagcagctgctgaccctccgagagctagagatgattggcttcattgaaaacaacgtgtcaaaattgagccttcttttgaatgacatttcaaggaagagcgagggcctcagcggccgggtcctgagaaaactcccctttctggctcatgcgctgtatgtccaggcccccaccgtcaccatagaggggttcctccaggccctgtctctggcagtggacaagcagtttgaagagagaaagaagcttgcagcttacatctgatcctgggcttccccatctggtgcttttcccatggagaacacacaaccagtaagtgaggttgccccacacagccgtctcccagggaatcccttctgcaaaccaaacgttacttagactgcaagctagaaagccaccaaggccaggctttgttaaaagaagtgtattctatttatgttgttttaaaatgcatactgagagacaaacatcttgtcattttcactgtttgtaaaagataattcagattgtttgtctccttgtgaagaaccatcgaaacctgtttgttcccagcccacccccagtggatgggatgcataatgccagcaagttttgtttaacagcaaaaaaggaagattaatgcaggtgttatagaagccagaagagaaactgtgtcaccctaaagaagcatataatcatagcattaaaaatgcacacattactccaggtggaaggtggcaattgctttctgatatcagctcgtttgatttagtgcaaaaatgttttcaagactatttaatggatgtaaaaaagcctatttctacattataccaactgagaaaaaaatggtcggtaaagtgttctttcataataaataatcaagacatggtcccatttgcaggaaaagtgcagactctgagtgttccagggaaacacatgctggacatcccttgtaacccggtatgggcgcccctgcattgctgggatgtttctgcccacggttttgtttgtgcaataacgttatcacatttctaatgaggattcacattaatataatataaaataaataggtcagttactggtctctttctgccgaatgttatgttttgcttttatctcacagtaaaataaatataattaaaaa

SEQ ID NO: 206 - DNA, 2212 bp, Homo sapiens
ggggaacgaggcccacctgggagcccaggacttcaggggttcccaggcatcacacccccttccaacatctctggggcacctggtgacaaaggggcgccagggatatttggcctgaaaggttatcggggcccaccagggccaccaggttctgctgctcttcctggaagcaaaggtgacacagggaacccaggagctccaggaaccccagggaccaaaggatgggccggggactccgggccccagggcaggcctggtgtgtttggtctcccaggagaaaaagggcccaggggtgaacaaggcttcatggggaacactggacccaccggggcggtgggcgacagaggccccaagggacccaagggagacccaggattccctggtgcccccgggactgtgggagcccccgggattgcaggaatcccccagaagattgccatccaaccagggacagtgggtccccaggggaggcgaggcccccctggggcaccgggggagatcgggccccagggcccccccggagaaccaggttttcgtggggctccagggaaagctgggccccaaggaagaggtggtgtgtctgctgttcccggcttccggggagatgaaggacccataggccaccaggggccgattggccaagaaggtgcaccaggccgtccagggagcccgggcctgccgggtatgccaggccgcagcgtcagcatcggctacctcctggtgaagcacagccagacggaccaggagcccatgtgcccggtgggcatgaacaaactctggagtggatacagcctgctgtacttcgagggccaggagaaggcgcacaaccaggacctggggctggcgggctcctgcctggcgcggttcagcaccatgcccttcctgtactgcaaccctggtgatgtctgctactatgccagccggaacgacaagtcctactggctctctaccactgcgccgctgcccatgatgcccgtggccgaggacgagatcaagccctacatcagccgctgttctgtgtgtgaggccccggccatcgccatcgcggtccacagtcaggatgtctccatcccacactgcccagctgggtggcggagtttgtggatcggatattccttcctcatgcacacggcggcgggagacgaaggcggtggccaatcactggtgtcaccgggcagctgtctagaggacttccgcgccacaccattcatcgaatgcaatggaggccgcggcacctgccactactacgccaacaagtacagcttctggctgaccaccattcccgagcagagcttccagggctcgccctccgccgacacgctcaaggccggcctcatccgcacacacatcagccgctgccaggtgtgcatgaagaacctgtgagccggcgcgtgccaggaagggccattttggtgcttattcttaacttattacctcaggtgccaaccaaaaattggttttatttttttcttaaaaaaaaaaaaaagtctaccaaaggaatttgcatccagcagcagcacttagacctgccagccactgtcaccgagcgggtgcaagcactcggggtccctggaggcaagccctgcccacagaaagccaggagcagccctggcccccatcagccctgctacgacgcaccgcctgaaggcacagctaaccacttcgcacacacccatgtaaccactgcactttccaatgccacagacaactcacattgttcaactccttctcggggtgggacagacgagacaacagcacacaggcagccagccgtggccagaggctcgaggggctcaggggctcaggcacccgtccccacacgagggccccgtgggtggcctggccctgctttctacgccaatgttatgccagctccatgttctcccaaataccgttgatgtgaattattttaaaggcaaaactgtgctctttattttaaaaaacactgataatcacactgcggtaggtcattcttttgccacatccctatagaccactgggtttggcaaaactcaggcagaagtggagacctttctagacatcattgtcagccttgctacttgaaggtacaccccatagggtcggaggtgctgtccccactgccccaccttgtccctgagatttaacccctccactgctgggggtgagctgtactcttctgactgccccctcctgtgtaacgactacaaaataaaacttggttctgaatattttt

SEQ ID NO: 207 - DNA, 2606 bp, Homo sapiens
ctagaattcagcggccgctgaattctagcgagcaggcggcaggcacggtccgtgcggagaggcgagcgagcgggaagacgcagccaccttcctcaccagccagcccacagcggtttgttccccttctcgggagtgcgccaatgcctgggccgacccaaaccctgtccccaaatggcgagaacaacaacgacatcatccaggataataacgggaccatcattcctttccggaagcacacagtgcgcggggagcgttcctacagttggggaatggcggtcaatgtgtattctacctcgataacccaagagactatgagcagacatgacatcattgcatgggttaatgacatagtatctttaaactacacaaaagtggaacagctttgttcaggagcggcctattgccaattcatggacatgctcttccctggctgcattagtttgaagaaagtaaaatttcaagcaaagctggaacatgaatatattcacaattttaaacttctgcaagcatcatttaagcgaatgaacgttgataaggtaattccagtggagaagctagtgaaaggacgtttccaggacaacctggattttattcaatggtttaagaaattctatgatgctaactacgatgggaaggagtatgatcctgtagaggcacgacaagggcaagatgcaattcctcctcctgaccctggtgaacagatcttcaacctgccaaaaaagtctcaccatgcaaactcccccacagcaggtgcagctaaatcaagtccagcagctaaaccaggatccacaccttctcgaccctcatcagccaaaagggcttcttccagtggctcagcatccaaatccgataaagatttagaaacgcaggtcatacagcttaatgaacaggtacattcattaaaacttgcccttgaaggcgtggaaaaggaaagggatttctactttgggaagttgagagagatcgagctactctgccaagaacacgggcaggaaaatgatgacctcgtgcagagactaatggacatcctgtatgcttcagaagaacacgagggccacacagaagagccggaagcagaggagcaagcccacgaacagcagcccccgcagcaggaagagtactgacccaccccggctgctcttgacacttccattgtgtgtgggaacgtttcttctggagaattggaacatgtgtggccccaagctcaacagaaaccagttgttcccaatctgccgttaccatcaacgcactgttgcatatgccagccactgcgcttggttcccattttctttgctaaggtgtattagcggacggccctctggccacctacccgagagatcgtagggtcacattcatccaacttcaccacttggctgcttgagattggttctgctcttttcttcattcctttccagaacaactctttcccaccccaacaccactgccaccacccctctttttatcctggtgtgaaacaatggtaatttgatatatggtatttatattggcatttttcaacccagtgtcactagatgtcacacacatttgtggtgctttgatgtttgcaagtctaacctctgaacataaatttggtcaaataattggaacaaagggaaacagatacttgatatgaaagccataatgacggtgacttgtgtcgtgggggaaaacataaggtcattttctccctctactcacaatactaaagggaaaaaatggattcaaagctaggatttcagggcccagcagtgttcctccatcagcatgttagacaactacacagtatgttgttagttttgaaagacattcactcaaggaaaacaccatctcaactttgcccgctcaccatgtcccttgcccccatgtagcccatttcccaggttatgctcttttctttctcagggtcctctttggtgggcagccactccccgagatgttgccatcagttttctgcagtccaaagagggtatggttaggtacgggtcttcctgcctcattcctcttcctctttgtgtaggtttcagccacaaaactgtcattcactctaggggacccctactaaagggtaacttcaggtgtgcagccctgagctccaaggctctgcaccatgccacacacttgctgtaaggctagaagtgaagaccttattaataggagcataattgcgagggagaatcatggttctgcagtctggtgtagacactggaataacagcacagaaaaatctatgactcccaatatcttctagaataaagaattttccctctttaacacaagggccctccttgtcattgaccttagctaaaccatggcaattcataaatagaggaaacattaatgaattaaaagcattccttattttttaactaatatttgtacattttcttagtctctttccaagtctttgcctcttttttttctttatttttattttttcctttgacagatggtatcccttcctggatcattcatttcaccttggtttctaactttaggtttactttcacttgttatttgacttagcaggtgcaacaaaaacaagaaacaaatgtgcccaccccactttccgcttaactgaaaagcttaaaataaatttccgaattatg

SEQ ID NO: 208 - DNA, 634 bp, Homo sapiens
ggtccaaaatttttaatagtatacagacaacctgttaattttttttttttttttttttgtaaataacaaacaccactttgttatgaagaccttacaaacctcttcttaagacattcttactctgatccaggcaaaaacacttcaaggtttgtaaatgactctttcctgacataaatccttttttattaaaatgcaaaatgttcttcagaataaaactgtgtaataatttttatacttgggagtgctccttgcacagagctgtcatttgccagtgagagcctccgacggggcaggtactgtgccagggcagctctgaaattatggatattcttatcctcctggttccttcggtgccaatggtaacctaataccagccgcagggagcgccatttctcctaaagggctacaccactgtcaacattatcctggactctgtgtctctctctgttgggtcttgtggcatcacatcaggccaaaattgccagaccaggaccctaagtgtctgatagaggcgatgatcttttccaaagtcagtacttacaaactggcattcttacaggctgcaccatttcctagtatgtctgctttaagcctggttcaacctctcatcgaatattaaatttttctttgtaag

SEQ ID NO: 209 - DNA, 1365 bp, Homo sapiens
tttaaagatcataatgctatcatttattgaagaaagaaagcaaaaaaaactaacaattgtgatgggggaggagagacagcttggcaacattccttttaaagttaagttagcataaagaaaacaatatttagtaaatgaaatagattttcaaggtaggaaaagtagtactcaagaatgtatttttggatacaaaaattcagttacacaatcagtagcattcaaaattagttatgagtatttatacaattacaaaaatggattcatgttttaacaacgtattttaaaagctcaaacattttaaaacaggcacaatattctaaaggcatatgcattcaccatgggcttttgaatgtcctcactcccaacttcacaatcaaaatctacagaagcggcaaaagatcagagttcagagggctattttttttttccctttccttacttaaggttgcaaacacattgacagaggcaaaataaacacgtttcatagcagaaagaccaaaaaattgaatgtaaaccatagctctcccttgggagattacacaaatacaaggttcatctgtacttagaacaaggctcataacttcttgtagcatggacattcaacaggcacagagcaacaacattcacccaaataccagctgcaatttgtcctttaaggatgcctcacaaggatattatgtccaggtagctagtccatttatatcggggaccagttgtccttttgttgtttgtggctgtttattaaatgtagtggcacaactttgttgtgaatatgtaccatcatttgctacaatctagacagatcatcctgtctacaaaaaatcattttctacatttctaagaccattatcagtttatctgctcctgctagaaaaggacatactttttgtcaatttacattaacaaaggctctgctactccccatttactcgctgcaatgaaaactggtaagccaagggtaaagcttaagtatcagggactatgaatttagggtagaagtgaaaataaccaaagtggaactaaatcccctattctggagtgcaactgagatcaagtaaacttcgctggactttcttcttaactataaaactattaaccagaaggtaaagtcacacaattttacctcccaacaaacttttaaaataaaaatttccaaaaaatttagatgtctaggttttgttatatcttaccaagagttacacagacataaatttgtatttaacttcagttaaacatctattcactttttaaaaatgctgtctgcaaataaactactggacatcttaagcttactaaaaaaaacttaagatttttaaattaaaaaaaaaaaaactaggacaaaaatctagcaaatggtttccctcg

SEQ ID NO: 210 - DNA, 1170 bp, Homo sapiens
aatgtttcaacaacatttatacatctttttaattagattagctttacaagcaacttgagagctctttcataatgaaacactgcttttcaaattacatgactttatagtctatctgtatatgaatcctgaaaatctttgcctactcttgataaaggtctgtgttttacagctggttaatgtgttgaataaaaacagcattatgaagctttatctttaaccaggattaaacacatataggccacaaacagttttaaattttgtttgaaatagagtcctgcttggtgacaagttaatagtcccactaacatgaaatgaatggatattaaataaatggccatcctgatttcttgatcttttcacaatgattcctaagagagtatataaacttttccaaaaaatatacaatttaagacctgtctggcaagcacaacccacagatagtagaatctaatactttttacaactgtagaggtacacatttgaatgacaacaggggctcccaaattaaaaggctgtggctgtacattttgacaatcaaacaaacctcccatcaacataaaacaatttctactaaccctaaaaaagataatgcttttgagttgtggcctaacgccgcgcactgtactatagaccagatggcaaagacaacttgcgctcctgggttgggctggcagaggcacttactgtagagatgtgatgttatcatctggaaggaaggggaggaagtagaacaaaactgaatatgggcgaggaaaaaacaataaactatcactttctcctgcaaattctcctaagtgagatcactatactgaacattcaatcccatcctaagtccactgttggcttcactacacaattttttttccatgttttacatgaatagcaatggcaatcttttaataaaaattactgagcttcccatagaaaaggtctcaaattgaatacaaactatacagatgctaaaaatgtcttaagttgaaatatacagaaaatttctgtatactcacattttggcaaagaagatcaaggacagagatagaaaacctaagtgggcaaggtcttacacccataattcacgcaaaatatggataccaccctttaggttttgctaaaaagcctaggaaagtgaagtctaagacatccgtcccaattcattctttcctcgtgccg

SEQ ID NO: 211 - DNA, 1055 bp, Homo sapiens
caaatacaagactttgtttattaataaagtaattcattatgacttttgaaaaaaaaagttttaaaatgttctgtgtacatgtcaatgtaggttaggccagccaaaagacaaagcaaagcatcaacattaagtcacaggctaggattatacaaataagaacaaacacaaggcttatggtacttgttaggtaaacacaaccaaactaaactgtacttcaaatttgtttatataaaagcatattaaagctcactttaaaatagtgtccatcttttcttttaaacgggcatagactcatttgcagtcatgtacaaatatacctaatagctttcttcatcttttaatacaagtacaattccttgcttctttatgcaacctaacaaaataatatagaatgaagtcattagaaaaatatgaacctttctgaatctatattacatttttaatttaaattggaaaatacagtttagatcatatgaaacatatggatttcagacatgtattatctgtttctaacagattattacaggcggtctttattttggctgaaatgcaaaaatatgactttcttaataacagattagttaaaaatactttccattgatagcagtgctagtccctagaacaaaaggtaagcaaaacttatttgtaagttactgcctattcaatgcccagaatatgtagatcctaaatctaagcccttaatatacatctactttaaagataactgaaagatctcacatgcctgataatccttaatttaaaccgtcctgtaaacatagtcaaaatctgctaatagaaatacaattcaagtaaacattgcatatttgatttaaaccaccttacagttaaattcactcatgacacattggatcataaccactaatatgtaaaaagttttaaaaaaatcatccttacgtatagatgaaaataaactttgtaaacttgttcatttaaaataacgaatgtactgcagctgctcttgtggtttggcatagtttcaggtactgaatattcaagtaaatttgttcccaggtaaaccaagtctcctaatttgt

SEQ ID NO: 212 - DNA, 873 bp, Homo sapiens
agcattttttaaatggctttattaaaggctacaagtataaaatatgactaagttacaagtcgtcagtaagaatttattacttttgaaaatgttaattaaagaaagggagacgcaaagaaagggaggctcttcctgaaatccacacaggggggtgcggctcagacgggtgacagacccccgctgttcccagtagggcagcacccccaaacccagggggccaagggaggggctcccagatgaaacagaggctggttgctgatttcttgggggaacttttgtaaaaatgaagacactgaatccttgagctgaatcccaggtgcagagactggggggaggtggagaatccaaaatcatgctcaggtttctcctgaaaagtgtgtattttctaaaaaataaatataaactcctggtttgagaaactccctcatgatgaatgggaggaaaatcatggcaaatggagagctaagaaaccatcttcgcatagactttgcccaaggtgtagaggaagatctgccggtcaggcaggatgaagacccacacatgagcctgtgtcctccaggtcgtcccttcttccaaaagcacagcaaagcaatacaacttgaggactccctccaagatttcctaatttttgattttacatttaatctcaggaggctataccattaagaaacattattagagttattgctgggtgctgggccccagacgatactaagtgaggcagaagctttcaataattcctacagccctcagcaccaagaagaacttggagggaatattgggcttgttgagaaagtgggaaagaaattagaatttctcccaatagaagaggcagatcaccttggcctactctctaggacacaggtctttctt

SEQ ID NO: 213 - DNA, 816 bp, Homo sapiens
aagacgcagccggtgaccttcgacgagatccaggaggtggaggaggagggggtgtcccccatggaggaggagaaggccaagaagtcgttcctgcagagcctggagtgcctgcgccgcagcacgcagagcctgtcgctgcagcgggagcagctcagcagctgcaaactgaggaacagcctggactccagcgactccgactcggccctgtaaggggcgccgcccgcgggggggacgcgcgcgtccgcggtccgcgcggggaccggcgtgtgaaccccgagagtgcccgcgccctgctcccgggggacccgcaaggacccgggaccgccgctcctcgcgcgctcggactcccgccccgctgcgaaccggtcggtgcgcccctcgccgcgctcgccctggcccgggagcgccgggagcggggccgctttcctcgtccttgtaaatgtttattttttaactcttcccagtgcgaactctgctgtgagtgtgtgcggggaggcgcgcccgcgctgagtcggcggcgggtagccactccatgcccttgtccgatggtttgcaactccgattttgcacaccgctccaccgtgccccccagcgcacacccattcacactcacgccaacactctcgctgaacacttttataattgttaggcgtggccgttgggactttgggcgcagcgcggctgctactgcgtctggaggattgatatttatttttgcattgcgatggctgaaggcatttatttaacgatctttttacctggatatgtctgtgaggctcctgaaaggagacaaataaagtcaatatatttgcacaa

SEQ ID NO: 214 - DNA, 351 bp, Homo sapiens
ctatttttcaatgagtcacctcttcctatgaaattgaaaactggtcactttcagaagctattctgcctatcaatgtagcaataagtttttaaaaaagaacaagaaatccacttaagtaattaattggatagtaaattgtacatacagaaactagacaaatggaaaactgccatattcttttcagtagttagggtactggtctactggtacagactgataatatatactgtacactgtaaccacggcaacctgaagttcaactcttcgaatcccaagaaatgtaaaaattgttttttggatttaaaaacgttaagctgagaaagagtaacactttcaagttttcattttgtg

SEQ ID NO: 215 - DNA, 398 bp, Homo sapiens
atggatgcaggtatggggatgctagccgtcctcttccacaccatacagacagcctgtcagtggcagagtaaggccagcatgcaaatagagcaaaggtatacaagccaagtaatatcaagacaaaagtcagggattattacactctgagatcatttgagactctagatttgtctcttaaaccaaaattagattgtgttagccaatgactacattttcccctcttaaactagattgagttgtattttgctacttgcaataagaagaatcctaatatacttatcaaattgccagtgttccaaatttaaaactttaatgatgataaagttcaagaaaatgacactctaaaatacaactaggtcaaactttctagaagataaacaggcaattacattgaaagc

SEQ ID NO: 216 - DNA, 427 bp, Homo sapiens
atttaaataacattttaatgacaaaatttgatgctctcaagtatcaaaatggaaataccaacagcaaggtttccagggatgtccaacaccacagagcagggaggcctggctgggcctccactgttgaggtcatcatggtgcttccgctttattctgattaacttttggttacacacattgaaaaatgacctaagagagttgttttgagtggcgctttttctcattgtacagctcctgctagcagtttactgcaacactgatttctctggaacctctcagtttccagtcatcattagggctgttactagcaaggacctacaagccagcctcaaaatgtgagagggctgccgacagtcttcctgtggttagctgccacagtgcccagggaccatcttccctctcctcctcccccactgccagctcctgt

SEQ ID NO: 217 - DNA, 407 bp, Homo sapiens
agtgttacagacagatattgtgaaatttttccttgggcttctttcaatttcgttcaattctcgtccagtattctcataacatttggatcaggtactttatcaccttgtagtgtcactgttcctttctgtatcctctcgaagcctcctgttactcgttttctaattctcttccagcccactgcacgatctagtgtcgaatggatgaaacagctgagcagaacagttctttagctgtcggcctaaatgaccaacttcatgacctctcaaggtctcgctccccggctgcacgcagctcagcttccaacattcgggaaaggcgtgccggatcgcgaggggccgctgggaccgagtccggacgtcgcgacgcgcagggggctgctgggccggcggtctcgggaaaagtgagg

SEQ ID NO: 218 - DNA, 494 bp, Homo sapiens
ccgtttctttggtggtggctcagcctttacttttggctgtttaactttgggtttcacggaaggggcttttgtagttgtagtttttgatgctagaggatcagaagttttactgctactacttggcttagcttgaacagttctgatagtttgtgaaggtttatttcttggctttttagaacacactctgacatattccttcttgtttgcattttcaatgaacttcacatatattcttttgtatttactctttgcatctccaaaatatccaagataactatttgtagcagcaaattctctttgaccatctcgaatttcaggaacaaatttctgtaataaagctttttgtactttccaaatagctggaggttcttttcctgtttttaaagcctccttaaaagtctctatgtcttctatctttaccacaaattcatcacgctctctgtattggccttctcctccgctttctgtgtcctcctcatctgtaaaaccttcta

SEQ ID NO: 219 - DNA, 433 bp, Homo sapiens
cacgtaacacaaaagcttttacttggaaactggcaaatactggactagaatactgacatgctcacgctctggcgggagctcggatgcagaagctattgcacaaagcccctctgattgccttgctcctctttggcatgtatcagcagagccccaagggccaattgcccacaggtggggactgttctccatcaaggtatggggacccctacttccttgttttgttaaaaagtgcaggtaggcgaagaagcccaggcagttgacccagtctttgaaacagctgactccccagcacccagtgtccactggcagatgagaggtttgcacctataccagcccttgtttccttggtagggctcaagttgtcagtgtccaggtacctgggctgggccagagctggggccaggggagcctggtcttgaggggtaagggctgc

SEQ ID NO: 220 - DNA, 404 bp, Homo sapiens
caattcagaaagtgtttattggccggagttgtcggagagccaaaagaagcagtccaggagggcttccttcaggaggcagccagcacagttgcacagggcagcttccactgccatctgccagcactgagtcctcctcatccagacacaggactgtccatgggcctctcaggggtctttggggccaggatgggacccctcagacctggcccaggtgggttttcaaagcctgcagctctcggctgttgatgttgttgcctccacacacgattaccacaactgaagtcagggaagggggcaggcagccctcggcctggagcctccgcaggaggcctgagtagatggctgctaaggctgccccacaggcaggctccaccagcatacgctcatcatccaggagctgctgc

SEQ ID NO: 221 - DNA, 399 bp, Homo sapiens
aggatttagaaatattttttcttttataaaataacttggtatttttctgataatcttccaatagataaataaaaacttttcttatgctacagtacaagttgatttttaaggaaatttgtgcaaacattaagaaacaccgcattggttctgggtgaaagtgccagtctggaactctcttgaaagaccatacagtctactgctaaaccctgggactcctcagacttgcactcagattatcgtttgcctgccctgattttagactctgctaattcaagtccctgttatcttgcttgacatcgacaaggatcaccgcaccgttccttcagtttccacagttccgtcagttcccacggagaatactgaggagaagacagcattcctgtctcacaggtcttctca

SEQ ID NO: 222 - DNA, 430 bp, Homo sapiens
agaggagtcggcgtttgaagaggtggaactcctagggcttttttgagagtgctgatttagaagaatacaaatcatggctgaaaatagtgtattaacatccactactgggaggactagcttggcagactcttccatttttgattctaaagttactgagatttccaaggaaaacttacttattggatctacttcatatgtagaagaagagatgcctcagattgaaacaagagtgatattggttcaagaagctggaaaacaagaagaacttataaaagccttaaaggacattaaagtgggctttgtaaagatggagtcagtggaagaatttgaaggtttggattctccggaatttgaaaatgtatttgtagtcacggactttcaggattctgtctttaatgacctctacaaggctgattgtagagttattgga

SEQ ID NO: 223 - DNA, 442 bp, Homo sapiens
catgaataattttatttttattttggtcatgactttttaaaattaatggaaagtctcagtctgctcaaatgataaaccaaaaaatggggtcatgaagcaaattcagtctttgcatttcttcaacaaccaactcacatttctctgctccttgactcagaggctggacatgtgctaacagcttttttgcttctgtatatccttaataggatggcagaatcccggtgttaaaagaatcttaaagtcagccgtgtcaccatgggacctcgattagcaaacagatgtagacattccttccaaattcagtcaaagaaaaaactctaataccagcagccatgttcagggtgtgcacgacatgctgagcgcttgggatacatccccttgtttaattctcacagaaactttgtgagacaagtactataatccctgtttaacagatgggcaa

SEQ ID NO: 224 - DNA, 376 bp, Homo sapiens
caatttgtatttttctcaatataatgttgcaagatgtcattatattctcattacccataacttcccatccaaatcttaatggcacatttggtattttttcaaatggctttgagatataattcacataccacacaattcatgtatctaaagtatacagttctgtagttctgtggttgttggttacatccaccagactgagggctccctgagggttggtgcctcagctttcccttcacttactcattcaccaaacattcagcgcctactgagtactggggttatgatggccaacaggagagacagtctctgcctactgtttggtgggggtggagtacttagtaaccgtcgtcattattgagtgcttacctgtgctggg

SEQ ID NO: 225 - DNA, 517 bp, Homo sapiens
ttaattagagtttgtagtatacacttaactttctgtaatctgcagtgatgaatctctatgtaaacattcagaaaaagagcgaatactgtgtcatgacttatgaactataaattttgtccctgattactagtcaagaacagttttatacatttattaacaactactttcctccacttaacaacagctcttaaataacaaaataaattatcagcatttccaaccacaaatttaagaattaaagtttaaaaaactggttagtttcataaatgcaagcagagtaataaatttcatatatgttaattgcagttacttatgttctttgagtgaagtaacacaaagatttttcccttccccttttggcaagttcacaaaattcatgaaaagtcttcacctttttcttttttgcttaatttcttttttgcatctcagctgaacacaacagacaatagctggggttattagcgagacatgataaaagaaaaggttatgaccactcagacgatcatgtatacctaaa

SEQ ID NO: 226 - DNA, 684 bp, Homo sapiens
aataggtgatatgggtattttattttcttcaagtattaaagaattgttttctgttgggggaccgccttcattcatagccaagttttcacaagcttgtagtgggctcctaactctgtcaactttttgggaaacactaaatgttttattaacattctgaatatttgaaacccttctgttgtgacttgtagaggctgaaattttcttctttttaatggtatcccaaagactcctctttttctttttctgctcttctgcatttcctagtaatatagcttggtgtttcagaacatcatttacaagaaatgtcataatctctcttactcggccttctttgagtggtgtccagttaacagaaataacaattttctctttaggctgcaacacgaaacagcgctgcgacacactgaagcccaggtccgcggccgggaagtgggagatcttcacttctgccacctcctcgttagggttgtctagggccagagacagcgtccgtgaggctcccaggagaacgtccccgaagcaaaggaaaggagacctgcagaagtggctgagagacaggaccggcggggaagacgcctcctcctcggccgcggggccccgcagccccgcgggcggcctccgctcggtcgggctcacttcccagcagcctcgccccactcgccggttcgccatggcagattcgag

SEQ ID NO: 227 - DNA, 443 bp, Homo sapiens
gcctgacaaaactggacatctggatgtccctccagtctacttatatactcacagagagaataagtttaaatattaaagagaaaacacaaagatacttggaataaatgtgcatttaaaaccctgactaaaatatcaacataatgatcataattacaatggtaataaaaataattagtacaataatattatctttatgagcagcatggaaatttcattcctgatctggaagaataaaaggaaagaaaatgtcaggtgaaagagtaagtagcctccaacttaagcagacagaataattttctttaaaatgaaaagaacattttaagctgtctttccccctaaaagatcagatctagaaagggctggaaatgaactgtgcccaggaatctgggggtgctctccagtaaggcgaactgaggctcatttgcagccaagacttggaactc

SEQ ID NO: 228 - DNA, 668 bp, Homo sapiens
ctatacagtatttgtcagctgtttttattcttcagtttatcatcttatatttggctctcaatttcacccataaattattgatggcttattatacgccaagtaccctgcgctccgctttttgtggtatccctcttcggagcgagaagtcacttagaattttaccccatcttccccacttgggaatcggaagggttcatagctaagttttgttatttataagcacgccggctcttctctatccctctctccaccaaccccatttcaaggttggtccctcccagcggacgacagtgatgaattcctcttggggacagccctcccgcaactaacggtggctccatcgacgctctggtctccttgctgctcgctgggaattcgggtgggacgttttccaaagtttggattccacggcacattcctccctcggaaaggcacaaccggctcggcgtgtcagctcagctggactcacgccggtgcggggccgcagctccggttctcgctgggcggctgcggagggctgggcgattctctcagcgtcgcgaggcgacccgggcagcagcaaacttctccgcttcccctcttcgggacgcggcacctcttctgcccttgagcactccgcaggaacttcccccggcctcggtctcgctccgaaataaccgagccagctc

SEQ ID NO: 229 - DNA, 387 bp, Homo sapiens
actaaaatgtctttaatgagagccttgaatcaagtaagcaaagtaggtgatgcccctgaacgggcctagctcctgcacagtcacagtccagccataggacccttgttccaggcagggcagtcgcacatcagggtcctcatctgagaactgaatcagggtcccctgagggtttagaaccctcaagcattctgatagaagctggtaagccctaggcagacctccccgggcaacagcatcccatgtgcctttgtccagcagtagttggaaagagcctgaagaagccacagcccccaggttctgagcatcggcgtgcatgaagtggaggcttgaggcagggtgtccagggcatagaggtgtttggcttgggcaccctccaggaggctattc

SEQ ID NO: 230 - DNA, 393 bp, Homo sapiens
caccgcacctggccctggtagtgatatttaatccaatccaacaactataggctgggttaaataaaaggtcattattgtctatattccaagtggaattaaatgtagtcacagagattcctaacattttccttatatttaagggaaatcacttctaaaaaaacacactaatcagaactgtgatgctctaattagaaacaactcatctggccaactatttgctgctcagagtttctcatttcttagatgaaaaaaactcatcagttatattcatgtgatcgcggctaaaaagtcagtattttctttttgttctaatgtggcttcatttgaaatttctcagattctacattgtactaattatgaataacaaattataaattaaaaactcttaaagag

SEQ ID NO: 231 - DNA, 418 bp, Homo sapiens
aatgttcccagaaatagtgtatttgtttgtttacatcttcagaggcaacggaccactaaatgttttgggtttaaaaacaatgtttaaaattatcaaatggtaaaagacatcatgaccaaagcttgggagatcagtgcctgtgtggagacccttcccaaaacagcttcaggcaaaggaagcctggccccctccgtgggccgagtgagatgcttgtgtgtgcagcaggtgcctctgtggtgctgggtgaagagcagacgacagggggggctttagaagtctccctggggcctacgctcccaagggcagactgctctcctccccatcccccaacagaggggcctgtgctctaagcactgcccgctgagcccagagctgccctccaggcacccgccgtcccaacggcccccatttacttgtc

SEQ ID NO: 232 - DNA, 516 bp, Homo sapiens
ctgaaaccatcaccataaagatccttccgaagtaaagaaatttggcattatggcctgattaaaatcccattaaatgtacacaggacaaggtctaattatttaaaaggaagccctcccttacctagttccctgtccacctctttatcctcatcattttccacattcttcagccacactgcagttactcaaaagcaccatagtatttcctttctggcttgcttactctactccttctgcctggggtaccattcccaatatgtggcttggtaaatttataagagaaacttttaaagatttaattcaaacatcattttgtttctgtttttttttttttttcctctggcttccaaaactggtcctctctggtagaactgatcactctagttatttggctatattaatcttccttcacaatgcttaaagattcttgggggcaggaaactgtcacacattcatctttgtcttctcagtagtgatgtgcgtaagtttgactttgacatatttgccccaaatctg

SEQ ID NO: 233 - DNA, 556 bp, Homo sapiens
cttgttttatcatgtaattttcagaaaatatgtgatccataaagattaaaagaaagttgtattaagtctggcagctttagtattaacttgaaataaaatatggcaagctttccacgtcctcctttatttccacaatccatatgtacgagctagattccagtcagaacttccacaaatacttcactctttggtagcagcggttataaattacgcctttgctaatttgcgttgttcccaaccaggagaaacattaccacaaaaaaagtcagtttcatcctgcagtgttcccgcagcaaccatattaagctggaagaataaagctcctttgtagtagtagcgtctattgaattacaatgtaaatgttgatgcctcccctggaaacgtcaaatgacaacaggtttacagaacgaattcagtggttgtttgcagctctggaatcccaggctgcagagttgagatcgaagaggtgcgtctggccatcttagcgttcattcaaccaaatctcctcactccatcaaaaccacgccactccccacctgcccagctcgtaaaagga

SEQ ID NO: 234 - DNA, 495 bp, Homo sapiens
gacataagaacagttttattttaatcacttaagacttgtgcattattcaattttgagactgaaatacttgtttccctttcaactgattaggaaatggtctgagctggcagaagttaatcctcacattattcagctaatgagagacagaatcctaaaacctgattccaacttccgcctgtacctcacaatgcaagacaaagcctttcattttaatgttgtacacatataaggaccatataatctggattaactttaggtaacaataacttaaaagataggaaaatgtatcatattacagagatttaaaaattgtctatacaataaatgatgaagaaaactaacaacaaacaggacgacgttcaaatactgaatacaattaacaaatggggccaaaagatcaacatttatctctcatcatctttcatgcaatgtctcagctttcttctcccaaacataaaggcagattaattcaaagtagccctattaagaatattt

SEQ ID NO: 235 - DNA, 552 bp, Homo sapiens
gcactgattctgcagaagctttatttattggtggattcagattcagcgtcccgactcagttactccagtaccatcagccaccaccacacagatggcctcagctcggatggccccataccccaccctagcgacccacgggtgagtttgctgagtatgtgagattaactggtggctcagtggtcggctcctctagtggataattccattcaaagccaatgctcttgatgccaaggagttgatactggccatagatgcccaccagcacctgcccctcttggctggggtaggcagaggagatctggccatcaagcttcccaaaatagaaatagcggtccttgctggtgtacatgaccataccccggaggaaagcttggaaggcgacaaagacttttgtgatgtattcgcctggctgcagggtgacttcctgggtattcccacctaaggctcccagtttcacgtcccaggagtctccaagtttcacctggacacttttcaccaggagaagacctacagacacccgcagccctgtgatttcatggtcgtagtcttcag

SEQ ID NO: 236 - DNA, 487 bp, Homo sapiens
gccatgaattcctttttactgaaataccgtaggactcactaccacaataagtacttaagctgaaagagtttctaatgggagccaagtaaattcagctctccactgtgcaaagcatcttgtcatttctataataaaagtctttccatgttcagtccactttggctctggaacctggatgagtcatgcttggggcccagggtgcctgtgaggatgctgcatgagaatttcagctgtggtggcagtggctgggagtcccactgactcagggggaggccaggcgagatgagctggaacttttaggggagagctggcacttagggacatcattgattgtgcttttcttagcctagttctgtcctgcaatttatttttcttatcatgtgactgtcggctgaagtctggggtcatttggtttctttttcttcttccttgctggacagtctccatggggtcacggttgtctaggtaattaaaacgaatgatatct

SEQ ID NO: 237 - DNA, 431 bp, Homo sapiens
gaaagtataaaaatcattttactttaatacaaaatcacataaagaaaggcatgttggctaaatcaaatattcactaaatatcagtgaagtcaccactggaatctcaatagcacattttcctgctttcttttctcccttctgctaaccattgaagaccagggtcatccgtgggagcagatgagtaggacacgcgtctgcacgctggaggccctgggggttgacatgggagcaggaagtggacccccccaccctgcacatcccttctgtttttcttgatttcagtctcactggcccaggccaaatcttcaagggtgtctagttctgcagccagggagaaagtgatgccaagagaacctcgtctcctccctcctcagtctgctttgaaggggaaataaatacacaggcctagtgtgtctgtgtggcacagggag

SEQ ID NO: 238 - DNA, 779 bp, Homo sapiens
acataattacatctttctttaattatcaaagaatcactttagaacattagagttcttccagatcactgaataggaatttcaaccattacattccagtacttagagaaaatgtaaatataattgcctttagtcaaacaaaacaaaaataatatatttggatgatgaacaagtcacccagaaagggctgaaaattagcatgacagggagagaaaacatttctgggttggcgacgttgaaacactggctgtgcattagtccaggtgtgggaattccagcctcgtcctatgttgctgggattctgtttagtctcaggcaaggacttgccttccaggccttagttccttcttctgtaaaatggacacacttgcctgtttcagaggactgaggtgatgattaagacccgtgcacctgctttggtatgcaccgcattagacagtgggctcacacttgattaggatcggaatcacctggaggacttgttaaacacagattgatgggccctactcccagagagtccgattaagttgatctggggtggagcccaagaatttgcatttccaacaatttcccaggtgctactggtgctgctgcctggagcccacctttcgagagcccctggtctgcaccataccaggctgttggataactctgtctggggtggattagacaaaattctgcgggcaggaggttttcctggccactgtcagaatacctcctctagaacttccgatttcaaagcaaacaagtttgttcagcatggacccttctttttgttgttc

SEQ ID NO: 239 - DNA, 478 bp, Homo sapiens
aaattaaaataaatttttattcaaagcatcttttaaaattacagcatgtttattcttatgctgttaactctgccaaactacaacttagccatatgaagcataaaacacttcaaaaatttgaatgtaaaccattttttaaaacaaaaagcagtcttaacacacctcaaattttagataccaatgtatttttccaagtatatagcttatatcaaaaagaacattttaaatgtttctaaatagttgtgataatttcttaaactgttgcaattatacaaataaaaaatgtttatgaaaaaactattagagttgacaaaagctgactggagaaacaaggaaaaacccttacttttgaaggccttaaatgttatcatctgtgaattggcaaatatttgtatttgaaaaattcttactacccttccttctttagttaagttgatcaaagttcaaatttcccaagactgatgagtgttgtttttag

SEQ ID NO: 240 - DNA, 748 bp, Homo sapiens
gctgcactgcttagaatttccagtacaaggttaaagagtaacgggttaaattttgctattattatagcaaaaatgtcatgtttgtgatattaataaacatcagctaagttttcattgatacacctgctagactaacactaaaaagtaattgcaaattagatatttaaggatctataaatatcttttataagtagaatgtattaactagaataaatttgttaggtatgctcattatgtcaatttcatgtataaatttctcttcctttctaggtgattgacatatccttttgtcataaaatcaaatttcaaatgccaagacctattatttcaatgtagcattaaaagctagcaatcactgaagggaagccaagttcccaaaagtttacttgtagctgacaaaaagaacagacagttctgaagtggaaaatgatgtcccgagagaacacagagtaccaacggagtatctgatttctcagggccttcccaggacaagggagctgccactgccaagtgctccctagcggcccagcaagcgagcttgcaggtgatgggacctgcagtgacactgccatgtggataatcaggtgtcttgtctgtattcttttatcacaaattattgttcgttacttcaagaaagaaacaagaaataaaataggaaaaaagccagagacaagtcttttttttttgccctgctcctcaaaaacgagaatgagaatttattctaacacatcatcttttcagcagacag

SEQ ID NO: 241 - DNA, 406 bp, Homo sapiens
aggctgtggaggactttattcattagacccagagagccatgagtgcctcccacgaagtccccactgcagggagccagggtcctagatgccaggccaatgcatgtgccgtgagctggccgaggggtctgctggtcccaagagcgcctctgtgttcttcagacagctccgggtatggtggcctcgccaggtggcttgaactatcttcgctgccatttgctgctgcctcatctgctggcggatcttaaagcccctccaggcggactggatggctgtggccgctttgtcctggcgatgcggctgcctgggactcagggcagccagctggtaggcggaggcccaagacactgccccggggccctcagtgccctggcccatgccctgcaccacacgggtgggctgtgtgcgt

SEQ ID NO: 242 - DNA, 907 bp, Homo sapiens
cagttctcagtcctctttttatttgaattctcagcaatattcacagaatcatcactctccttgaaatactttcttcctacttcactggcctcagtctcctttgctagattactctgcccctttccatcctctaaagttgggagaactccaggatttggtccttggtacactttgaatatattccctccctaagcagctcatccggttctgtggatttatatacacacggtacacagtgaaaggctggtatacatttcagagtcaatggcatacataacgctgactacagctttactttgaaaaacaaaactaagtatcttaacattttattttacattatatttaataaaaattatacttacaactacccagtaactcctagaacaaggacaaactcaaattttgttttggtgacagttttctgacaagattaatagagcacaatggacaggtcccccatttgactttcaaggaacaatcataaaacagggtaatctttactgcatcaaattcccaaaactacgcctttgaagtaagttgacataatacttgttgtttcttctcaaatttttaatggttctccacggtatgctaggtccttattttctcattggctgtaatttgacaagttctccaaaagcactatcatgaacttaattagataatactttccagctgtacttaaatcagaaggatcgtaggcctgataagcaggtcaacctgaagctaccaggcagctctggaggctcccgtggccatagctaacagtgcacaggagggcccctggcccaggatgagccctcagaaccttttagagagagtgaaattcagggtctactgggtgtccaagctgcagagtggagcgtgagaggtcagctgccatgtgatagaaagagctgacataaga

SEQ ID NO: 243 - DNA, 431 bp, Homo sapiens
cttgtccaagatcatttattgttattattatttttctctcttaattggattcagcgtttctggctcctcacacacatcctctctggtgggggattcaggtttgtgcaaagcacaaaggagcttgtacccacctgggcccccggccagcagcacggccggctttgatcggagcccctcttccctgtccgggctcgcctgccccagtccctgcttctgacccctgagtccggcctcccgagcctctgcctgcaccctgagcatccccaggacggctgggagggccaggtcttccgtgatgcagaagtgcctgagatggttcatgaaatgccctcattgttccccttctgctaaggccccgcgacgcctccctcctgctgtcccacacagggcccttgctgggtcacacaccaaacagcctcaaggaaaaattc

SEQ ID NO: 244 - DNA, 476 bp, Homo sapiens
taaaggcaaagaaggtttttatttaagtgacaacatttgagagctaaaaaccagctcacatcaaaatcaagacccagttgtaaaaatcttttaactccataatgctgtttttgtcttgttagaaatctgatatcttacattagcgtttctaacggattttgtacaaggcagccataaggaatataataaacctttttcaccacagaaccatctgtcacagataatactgaaagttacacacttaggaacagtcagaccacagacaaggtcagactggctgccaccaccaagtaaacaactagaaaaggacagcggggtccaagggtgggggtccctgtgcacgagtcgccctcctctggcctgccccccctcgggtcacctgtttctcctttgccccaaagagggtggagtcaaatgcagattttcctcccaactgcctgttagtgtctcaacaaggagagcagagcccaggtcag

SEQ ID NO: 245 - DNA, 531 bp, Homo sapiens
aacagtgatatacataattcaatttttattatcaccagtctttatcaatttagctgttctcctattgttcaagaaatgttatttggacaagttttccatagggcaacttgacttcctctttattcatttaaaagttgttgtctccttcaaagatatttagaggttgatctggtgagccctggaagtctaaagtcattttgtggcttcagaggcaggaagaactcccaacagcgatgtgtcgctagcatcttcacaaccatggttgggggtgtcatctgaggttcttgtcccatgtgggtcctctctcttgaggcaggtctccatctcatggaataaattctcctcgagagaacccctccttctggttgaaactctgaggggcagatgtttttgtttctgaactcggcaccacgtgagaaatagaataaacagaaccaggagaaggagcccaaagatactggataaaataagtgctaaatgacctgaggaggcattcagtgatttcagcgactgtccagagcacctcacgcc

SEQ ID NO: 246 - DNA, 640 bp, Homo sapiens
actgtgaaattctaaaatcatatttattcaccaattcacagaaagtgtcataacgaccaccaacatgaatcagtttgtaggcatttacaagccacagctgaaaataaaaatctgtctgtgttgaataggcatttaacaaattacttgaaaactgcaagaatcataattattataaatttaaagtttgtgattcaaacatgggtaagatcacagtcatggggagaagcccaacagattcctgtgatgatccttattttcttcctatatctttatatacatagagactctcagcgcccctcactctgtgtcagtctgaattggatatgacagctcagttaggcctgagagaggattctatgaaaaggagtggggaggggaaaggacattttctctgaccctctgtggctgggcaaccttgttgactgagaagacagtgcgctcttctgaaattagattcaattttctataaattcatacagtccttctaatgagatactccaaagtctgcattgtttcacactcatacacaatagtatatttatcaaataaacacattttctagactaaaaagattcattctttgaggcagcttgaagagctcagaagtctgatacatgtcaggtacacactggtccaccgc

SEQ ID NO: 247 - DNA, 472 bp, Homo sapiens
gtacttttattgaaaaggtacatttaaaaaaatacacagacattttaccatttacaggttgcagatatagatgctctaaaagagtccactctattttgttgttctatgataactcttgcccctgatatcacaaacattccagtcttgttgatatcggcttagaaaggggggcatgggagcatgacctgcaatatattcagcgaacagaaagacaaattgttcaattataaatttttttatcttctgtacattattgcattagggagccacaaaattatgtagcatcattacaaatgaaaacaggttaaaaatgaagaagatacttatatagaaatacatggattcattgtcttcttgcagaatgcacaagaggtgcaaaaatgtgcaatttaggaagctctttttctgtttgtatacgtttgcttagcaacacaaaccagtgaggaagctacaaaataagttaaacaaaaat

SEQ ID NO: 248 - DNA, 481 bp, Homo sapiens
attatagtaaatttattttgtataaatacatattaacattatttacaatgctaatttttttatttataaagtatctttatatggacaaaaagatacaaactgttatcattttaagtacaaagtatttctagaaatacattataagccattaaaaaaaaaaacgatatttcaagattggttcttacatgctatgaccaactcatatgaaagagcaagttgctcccccttcattccttcccccaactccaaagggaaaggaatttgatatttaggctttaaaaaatttcctactacctttatcttttaaaaaaccctactcaaaacaactatctcttataagggaaaatatcatagataagattttcctttagaaaatgacattaaaagtggcatgagccctagaatgatatgtgtattagaggcacttaaaaaaaatcagaagggatccataggaaggaatttaattcagcaaatactgagt

SEQ ID NO: 249 - DNA, 522 bp, Homo sapiens
aatttcatagcaacatgtttatttaagccctagctaagttttcatttacaagcaaatattttcaggggaaaaaatcacataagacaatattttcaaatgttataccatctacataaaaattaaacttgcagaatttacaaattaatattctgagcagacagaaatattatacatccttttgcaaaatccagtcaacaacttttaaaaattcatacaggcacaacacaagatagtctctctatacaatctacctatttacatagcttttcccaccacagatgataatagctctcatcatagctaccaaggttcgcaaacatagtatatttaaaatatatttagcagcatataaaaaattagataaaagggaaggaaatactactattaaataaaaacaaaattaaatggtcataatagaaacaactccataggaaaatagatcaaaatatatttctgttaggacatcaacaatgtttcccatcacagaatatatgcacagcactggaaaaaaaaaaaaaaatt

SEQ ID NO: 250 - DNA, 513 bp, Homo sapiens
cccctccagtctgagatttctgtgtggctgatggagagtgtgatttgggcgtaggtcttatttgcaaacctgctcatgttctaagctttcttcaggtagtaccacctgtcatcgcttctgcatatgatttaaatggatttttgtttttataaaagtatcataaatttagagataaaatggaggggacccagctttctttacaatgtggatctacctcagttaaacagttgggtgctattactaagtctgtcaaattaaattggaaaaagtaaccaaacagtgagatacaactccacatgaaacttgaaattgtaatttccgtttatttaatgatatttttatttatttgtgccttttatgttgaaccccaatgcattgaaaaaattcagtatgaaacagtacatattttatttatattacaggtgggagaaaagtccaattggtcatggaatttgatagacttttccccagccaactgctacagtgtattataatcccgactgcccccctgtg

SEQ ID NO: 251 - DNA, 665 bp, Homo sapiens
tgaattcagtcaagtttattaaacttgctgtgtgctcagcaccgccctaggcagtaacatgaaaaacattacaaaagaagatctcaacaagggaaaaatatattctgtactatattaatttccaatcatttacatgttgctttttaaagtgttcttaggtcactttggggtatgtggtctccttctttctccatgttcccctaaagcttccacactgttgaattatgtgcctgtggcgaccatcctccaggaagggcaccttcctgctgatgaggcaaccatgggttggtcagggctggggtcccgtggtggaggagacatgctgagagaaaaaccatcaaccccgagagctcaggacactcacagtgaatcccagaaggccaaacgtggggaagccacaaagagggctctgggcccctcactcaccccctcccctaggggatgtgcttaaagtgctaacgccgtaggaaaatgatgcatagctacaagccgtcctgggtgctactagactcatcgcctgcctcttcctccctaacttgtgctaatactgggcgatggcacaggccaatagaaaagtctagtgcccagtgaagtagtagagaaggtccaacgtgtaacctagaattcccaagaggaggtggggacagaagagaagaagtgaaggg

SEQ ID NO: 252 - DNA, 558 bp, Homo sapiens
agagtttcacaaataacatttattgaccacattcataacagaaactcacccacattcacatgaactttgctacaaccaagaatcacctgatgagaaatcatttgggttgaatcctgggtgtggattctgttctgagaagacagcgactgtcacagacgcctcctgattggtggactctcaaagatcttgatcgtgacacatttttgtggctgttcttgacagtagctgaagattccaacttcaaaccccaaaacactggcgaatggccatgatgaccctcgggatggcctggaggagggtcaggaggccgaggggcagcagacgcgctgcaggagccggtagctggtcctggtagggggcctggagctgctggaacttggacaacaggcactcatcaccgcagatccgccagcagttgtgccagcagcatgcatccagcaggggtgctgctttcggggtctcagggacagagggacccagtaaggcagtgctgcttccaccctggacacaggcaggcggcccccgaatctggtctggcattcacagcagatggccagg

SEQ ID NO: 253 - DNA, 451 bp, Homo sapiens
cagctagaaataagttattttattttaaaacacatacagattaataaatattactggaaaacttaatagcctttttatttacatgaggcaataacaacatgctatgactacatctataaagcaaaatataagcaggtcttggccactgacacatgtgtctatgtatgctaattggaagctccccaatacatgtctatgacaaaacttttacacaaccaatcaacatttgacattttttacatcttcttcctctcatgattatattccattttcaagaaaataatagttatcctttgaaaaggcaaaacgctcaagccactgaaaaacagtatctaaatttctgtaaagtgcaaaaatactaaggtggggggcaattattatattctgacaaataaatattctgaacttttcaacatgaccctttggcactagtggtttgggagccctgaca

SEQ ID NO: 254 - DNA, 735 bp, Homo sapiens
agtgcaaacaaacatttattgtgaaatattcatcctaccctttattaggtattacatcatcaaagcactttgtggcaatgaaaatagctttttttacccctctaattcacccaatattccattaaagctgcaaaaaatgtgcaatctgcttgaaaaataggttgctcttatttactcatttgtgaaaagtcaaaaattaaaaaagaaaatgatactagcatacagggcctctagagccaattcacctttccatttcccaactactccccaaaataattaacaaagataatttgttttaaatgcctttttataaaaccaatgcacctttccccatattataatcatacaaattttaaaaagccgttatttactttcttggaaaaaaggtggccagccgttgttttttgattgggagcatgtgtatttcctgggagttcactttctttaactttatgctccggtttttgatgggtttcctaaggggctctgcatttcccatggactcttccccttggctgttgatgtcatagccctgaagcacggagtcttctcttttgaaggagaagtttttggtggacacccctgagaggcctttgatcttgccacagaatatggtaggcacagcatcttcgacagagacaatgaccttggccgcctgggactcgcccaccatctcaatgttattttcagccttgacttcgccgctggggtggttgggctggctgagcatctcgg

SEQ ID NO: 255 - DNA, 1270 bp, Homo sapiens
cttggactgcagctagccagcatgctaggctgctcattctatgaagtgtctgtcagtgaaaattataatgatgtctacagcgccttccacgtcctctgtaaagaggtcagtcacaaacagcagcctagcagtacacccgagaagcgaagaacctccctcattcccaggcccaagtcacccaacatgcaggacctgaagaggaggtttaagcaagccctctctgccaaagtgaggactgtcacctccgtctgaagcaggaggagcactcaagggggtttggtcttcccaggaagagggcctgaggttctcctagtgcaggaacgttgaatattggcaatgattcctggttccagaaagggctggagcagaagggccaagagggcctgtggaactgctacagaaaaggaagtgttgttctgagcagggggacaggattgatgaggcttgaaagagcccactgagccactctctgaatatgtgaaatgtactctgtgtcttttcctttagagtggggagggggcataatcgtttcggtttctgcattcaactaccttgtaaatggtggtccgttgcagtttcaccaaatgtattgatgtgatttacagtgggaatgaaagaacagattaagcattgataggctttcttttttcccccttttttcttttttctcttttcttctttcttttcctctttttccccaagaggaagaattgcttttctcttaccagtatgatttgtaactctggaacactattcttacagaatgcctttctaacctgaaggatacccagatttctttctttatgtacaagatggaaaatcccctacccctcaaaaacaggttgagtttatgggccagaatattctgtataccagacattggtaagctctcatggtttacaggaaggctctggttccccctcacaggatgagcatgctcagttgggcgtgtgtggaggagctgtgaacttcacgctcttcaaccccagactttgactgtatagttttttgtttttttaactgttccatcaggaaaaaaatgtgtcagttgattttggtgtgacttgtgtaaatggttcatggcaatgacgttgggttgcttcctaggcctggctgagttgtgcctaagggtggctgaaatactaaaacactatcttacagcaagtgaacaggggctacctgccacatcccctccacagatgcactttaaaaagccactcaagctttggcttaaactgtaattaatttattttatgtacaataaatcgca

SEQ ID NO: 256 - DNA, 991 bp, Homo sapiens
aaaatattaccttttattttctcaggcacacaagtgatttggataccaattatcaagacattttactgatttccctttagaatgatctattttaaatcttcagccaccttagaaaaagtttgcagcaatcactttgcaattcataagtatcaggttagaatttagttgtggaataagttaacagtttatgttcaatatgtgaggttatttgaactcctgagttttaaatatcctgtggaacagtgattcctctcccttctaatggcttttcagattaaagcaatgactttaaaaagattacatcctaaatacttgattacaacagaaatcgaccaatctaaaaatcagatagtgttatactgaacatcattctgatataatgagtagcctctggctgaaacaaaattccaccaccaaggccatcaaccaggttagtactgtttttcctggggtctatgtaaaactctccttttctctgcaaatgctgcttggctgtgaacagcatggatttacctgcaccaatgtggcacacacctagcaactttctcaagcattctaaagatatccccagagctaacaaatattgacatatgtcacagcacctttctcaagaacagtccaaatcagcagtgcacattcacacacacaggaatgctggggatatgcttatacctgcaccacttagttacaacaaggggaaataagagtaactaatgaacttaatagcttcacaagaaaaatgttttatagtcatatacttgaccctatcagggaaaagccacctaaaagcatgtgtagctggttacaaagtgcatcaagggagagaatggctggctctgaataaacccacagtcacttctgaacataaagtacacattctaatgacagagatttggtaatattattttcacaaaccaaacagtacaaatttcaagttatttcacaaatcagatgatcaaataaaaatggacatgaatatgcttagtaaatt

SEQ ID NO: 257 - DNA, 973 bp, Homo sapiens
ccttcgtatgccacctttattgtgtttccccaactcctgggccccatggtagactggccacatggctactgggctcctggccttcctagggctagcagctggtgggcaaacactctgccctgctggagagctgccaggccatgcccgggcacaggctagtggggctcctggctcagtcctgatagcagtgccagggaggcgtagagtgcacacatgcggccctgggcctgcggctcccagcacacgtggggagtgtcctcccccagctctaggccacactcgtccagcaagacccaggccggtgctccttcgccccagctgttccccaggagcccggggggcagggacatggtgctgcgctcctgccacggggcactctgctccaagaggctgcccaccagctcgagcggccccaacagggtctgcgactccagcgcctccgccagcagcttgtgctgcgtttcactcagcatggtcagtgcccccagcaggtagacaacagggatagcgagttccggcaccagaattccggaggacaacaccaggcactccaggacagcacctgctggaccgtccaggggctccaccggcccaaggctctggcctgtccagcgcctcctccaaggctcgcagggccagctggtcccggagcacccctttcaggcccttccacagcagctggcacagctctctgtccaaaagctccagttccttggagatggtctccacctctgcccgtaggccctggaagtcttcagtgaacgccccctccgcagggaccccatctgtcaggaagttgtggaggcacctcatcatggagaggccagagggcagctgtggccaggcgccttcgctcgtggaacgcttgtggcctgtcgcgggtggctggaaggtcctctgcttcttatccgggaagagaaggacgtccaagtcagagtcaataaccagctgggccacccggaatgcgagggtg

SEQ ID NO: 258 - DNA, 928 bp, Homo sapiens
gtggaaatactttgcagagtttatttggacaggttcaaaaatagtccttcgacaatacaatcagatcgaaccacgacaagtaaaatgcaattatgggttggttacatttttaaaaaatgtaaacaggtttgggaaaactaaaagcaaaactacatcgtcatctcctccattcccaacccctgcatttcttacaagcaggacttcaagacggcatctgcaatcttttgaaatggatgagaggatgacactcactaaaggagacagctcaacagtgtgttctgaggccatttctcagaacaaaggcatacttctgcataaggcaaatgcagcctgataaagcttcccctagtgggtacatggaatgccaaagtcattcacctaaatgagctcaaaatacatattgttctgggccaaattatacagtgtcaagctcagactgtatgtatttatgtatgttggcagagcaggccacttttggggcgccacagctttatcctagcatcctgtgccctgctgggttcccatcgctgtctccccaaacccatgaatttccttggatttggttccagaaaggcagacaagaaacaaagtcagttgcacaagcccacaagggaacagggccccagaggacttgaatttctaatgaaacttaagagtaacacagaatgtgtgcctttgccaacaagccgggactttctgaaggttgatctgagatgggggcagggagtggggacaagatcaagtgtgctttgggccagcctccgctaagggcaacaaggcgggaatacaaagctatctagaactaaagcaactggccagtgcttcctgtggcctctatccagaactattccctcagacagctgacccctttctcagagcacttcagtggtgcttccaaggtgccaaagggatccatccaaataaatgc

SEQ ID NO: 259 - DNA, 1616 bp, Homo sapiens
gttcaaaaattttttattaataattcattttcatagctcagaaaaggatataatcagtagaacaactaaaaacaaaacctcacctctacagagatagccagtgtgtagactttattacataggcacatattaaaaaaaaaaaaacataaactggttttacataaaattaaccacaatagtgcaagaggttacactgaatgagaatggatgatgaatgatggaaaatgtaaggcttggaacagctgaatcattcactggatcttgggttcatccatcctgacgcactgaaatttattacagacattacaagaatggagggtgaggaatggtgcttctctgtcatcgcctggctaaaacactgattttgattaatctcttgaatacggtagttttctccaggttctcttgttaagtagacataaaagttaaatgaatgctggcttaaggtcagaggagttcatatccttctcttccctcacccctatactttagaactctcacacccaacaatttgctgttgggacctgactatacatctgctttcccacaatgctctggtagaataccactggggttgctgatccaaagcacatggaggcgcaacagtgcttaaggcttcagtcatggtgtggggctagacagcatccccaactagaattgagggtttgatctgtggggtaacacgagcaagcaggaagaggatgctggaattccttactctgtccagttggaatcaatccaacacatctgactaccacaaatacaaccagaaaagaaactaaaattacacactcaaacataccatgaaagagatgctattttgtagcttgtacatagtttaaaatttttttaactacaatttgatgttactaagagacaacgaggatacagaggggactgtcccttttctctcatctggttttgccataacttacaaatagtcccaggatgtttactgagtgtcctccttcaattttcacaatattttatacaaaatgacaaatatatatatacctcattgattatcctatcatccccagtacttggagggttagacctacttctgtgtcaggtagcacccaaatcctaacatctattttggagacctgtctgtgcctcttcatgctcacaccattgttctgatagatgatgccagtggaacttccaaagaagcattccacctgatcttcaccaccctggttgatcctctttttaaaggtgtgtgtggaaggcaactgcaatatagaggatttggaaggttgtctgtttctgttgtctggggaaatgataaaaaaaaaaaaaaaaagagagagagatgtgaaaaggaaaaagatggaccaggtgatttttccaatcttcaaaatttaaatttcttggttcttataaacataggaagagtcactgaaaggtggcaccaatggatattttgtaaaataacccacaactttagagctggaaaggacttgaagaaacaattaatccaacttcctcacttttttgtctcaggaaactgaagcccaattgggaaaacagcaacttacttaacatagtgattgtctccatggctatgtcctgtaaagattcacagaaaccccaatttccccttaatcctcgtg

SEQ ID NO: 260 - DNA, 924 bp, Homo sapiens
actgccataaagaatattatttaatccatgagacatcgtccgtacaaagttagcgttacttttaaaaatgaagaccgtgatataaactggtaaaaaacgggcctgatgcgcctcgagcactccctgggagcaggccctggggtggctccgcccagtgtcgttctacctgaggtctacttgtgtctccccccttgttctctgcccccagaccatggccaaagcctttcccacaatgtcccatctgagagccttatggatgggctcacagggcagaggtaggaggagaaagaggaaggggcatggtgggcacccagccctgggggcaactgagggcacagccacgtccccagcaagggcacgctccagtagtagtgggggagaaggcaccagcagaggcagcgctgaggacctgggaagaaaaggaccctgccccaggagatggtctcagcaaggagcgggatattaggaactgagacccaagactcagagaggcaggtgccttgggtgtgcctgagcttgggtcaggatctcacaggcctcacgccccagaaaaaccccgccttaaccaaccatctcacgcggagtcagcctcgcctggcaggggggcacccaggtccagagcccgggccctgtcttgggtctctggctctctggcacacagagagcgctctgcagagggcagccctcgcaggcagaccctgttccagcagggctgaggggcagccgtgtggcccagcggtcagtgcagcacctggtccagctcatacttctcgcagaagcggctggtgaaggggaagcaggtgaggtgctcgatccagggccagttaatggggtagatgtacagccacagcacgagggcggcgaagaggccggcaaaggccagcagtgacaccaggatgagtgcccgcttgcggtacttgtcgc

SEQ ID NO: 261 - DNA, 749 bp, Homo sapiens
gacgttgatataaagggcttttatttttacagttttctgtattttccaaatttctacataaacatacacataaaagtcataaaaatgtcccttaaaatgacactccctccaatgcagggagtgaggaggtgtgtgctgggacgccagcagggtggctgctggcagctaatccctgtgcaggtgcagccactgctacactccagcgtctgaggcccctctgcactggcagtgttagaatggctgtctgagagccaaggctgttcacccgagcagagtcatggagctggtacaggcaggagccaaggtaagcactaggctggtgtgtgccctccagggggcaccctccttgaagcaggccctccaaggtactcgccccctgaggcagccgataacagccggaagccttcccctggggggacctggccatttgtggagcagggaaaggctccactgccagtggaaatgtgaggccagcagcccaggatgtctgcttcccagagtccgcgtgggtcagtgcttgggccagacatggggctgcctgcggtggcaggacagtggcgggctgcctgggctggagggaagagcacgccagcgccaggaggtgctggggcagagctctggggatcctccccggctcctgaaggaggatggaggaacaaacctagtaacgggacccacttgcactgcaggaggcaggaaagcagcctgtccctgtccctggcttccctgtgagggacacagactcagat

SEQ ID NO: 262 - DNA, 1020 bp, Homo sapiens
tagttttcaaaaaaatattgatctggatcagatgggctgataaggcccaaacacttataaaccaaagctgcaggtctctaaggtcttcagagaagctacacaaaatactatgatttcattagcatccacatatgtatcattttccacaacattttacaattctcttgtttcacagggaaggtgaactaattataatgaaatatcagtaatgtatcttaaataagtaacatgttgctggaaaaaatttaagttaaaatgcactacataatagtgcagaaacaaagtgcaggtggcaattttaagacatgaaaacaatgctgaatcagtagtgtttggagtgatacattttgcccatttttggccagtcctagaacagtactcaccacaagctgcatgccaaatatgaactaatgaggctaaaacactgaagaccaaatagaaccactctagagtctgtttcacaatgagatactcctccccgttctggaaacagcgatctgctgtagttcctatcctcctgtggcacctatccctgctacagtacctataaccagatgtcctccatcatccagcctccaggacaagtggtgctcagtgagtcacaacctgaggaacagctgctggttaccgatttgtattcctgtatatactcgacttgggtagccaggattttctcgtttgtcttgaatatatttacttctaaaaagactgttagtcttgttgggaggtgagcagaggaatgtttacttgctggagaacatagtaacaaacatcacttctcacccctcataaacagaaagcccattgtctgtgccgtgaaaagaggactaccttgtcaggaagattttacttacctctacaagaaaaaggactcgtattaaaatcgacctgtggttaccacccttagaaatgctgttttcagatattcctattcctagtcttagaggcagccatggaatatatagtctcctctgaccttggggtcaggaagaaagggaaatctattcataaaaggaattt

SEQ ID NO: 263 - DNA, 788 bp, Homo sapiens
caagttagaacaaacattttattattaaaataaacttttgtataaaagcattacagatcaaaagctgtatttacacttatcgattcaaggtccaattatgcatcaaacattgaatggcacagcaatggtttacatatgcaagtaaattggacatacaaacacttagattccacctctaccaaataccttgattaatgcaaagaggagggggaatactgacacaggaaacctgcccagaaactagactggcagagatgtcaggttaacaaactgctaaaagttacatctccaaaaaggcacttatcattgttataaaagtgcttaaaatctaaacttgaaccttgtgcctggtttataaatttacaagaaactgcaaagaaccacagactagtttttaatatcaagtttccatacaaaattgtccaagaatttatttgcaataccttacatgtgaactgaaataaactttgcaaactacaattatactaaagttttatactgaaaattcaaatcagcttactcataatctccagatagctcttccatcattattttaattaagtattacattgcccaccaacctttgaattatgatcgtgtaagctggacgcaccacttacccttcgggcagaagaaattaggagaaattaagtctcaactgtgacaacaacttgtaacataagcgcaatacatgggattgagagacatcaatctgcaataattacctaatttttccacatggttttaagacttttgtgccttgattctattaaaaatttcaactagta

SEQ ID NO: 264 - DNA, 1027 bp, Homo sapiens
gtttgtggtcatgattattattacagtttattacaccctctttgacaacaggtatggtctctgcggtctttagcaagagagcacacaaaacagcatgacttaacttttggtattatgagtagatgagaaattactatgaagataaaagttgaaactatataagcatgaaaagtaaaatttacatgaggaggaaaaaattccttaagttgtatgcacatggttaacgctgacttcacagtgtctcaacaatttgccaaaattataaacttgatgtaatccaagactgaagacagttaataaactgttttgaagaaacatgtacagaagtcttgtttgaataaaaaatacatattagtcacatataatcaaacaactgaaaatgaactgaggcattacattgagctacgaataacaggaaacacttgaaatttcctgatagaggaaagtgctcattctcacatcaaagtcctgggtgaggccagtcactgcacactacagcagaagaacaagctcccctctggttggttttgacagcagcatggtagctatcaggctgaatcaagaatacagtcactactagtatgaacaaaggtgcttactacacaaattagaccgtatgccaattccgtctacagactaggggagtcagagcatcacagaatattcccaaccaggacagtctgaattagttgcctagtacagacataataatgtctgaaggaaaaccaaagtgtggatggatattcaatgcagggcttctggagacctgtgtggaagcctatcacctccgagaaaattaaagtcaagtcgttttgaggatactcttgattggcaacccaaagaagcaggaaaatgggatggaagcaagtgtccatacagcctgtattcacacagctgtctccctgtatggtgcttccaaaccatgactaatgccttcttaacttacttccgaatctcatgtaagataggttactggtgaattgtatcatggaatcacaaatggaatggattctgggaaatctagttc

SEQ ID NO: 265 - DNA, 1223 bp, Homo sapiens
agaacaattcttttatttgaaaactgctggtatgaatttcctccttccctcaattaggccagaaactcatcatggggcatgcacagcatctacaggaggaagccccagcttgtgggggctaggatggagcagccgtgagagacacctagccaaatgtccgtttttccatcataaacaatggagcgggggtcagggggagaagagagtgggtaagtgaatggccagaaactccagagggggcctcacacccacctgtgaggtacctccttgccctacccccactgaggcctcaggccccttgcttgggtcatgctgccccctgtcggctgctgcccctgcctcttcctctgagttctaacaacacagacactggtgcctgaaagccctgctgctgccagggagtcagaattctggctgcctctacttgggaatctcctcccatgtggggatctgcagaacatccagatggggccatcccacctcatgatccattcactcccagtgggatacactggaattcaacccggagactggagcccaacagattaaggcagaattctctttgctctggaggcaggtctgcgggaagggggggaagtctagctgcccctcatgtcccatgccggtgagggtacttggcttcccacagctaagcccaggagcttcctatatcccatctgctgagacagcaaggggtgccgcctggccaggctcctgacatggctccactgaccccctgaaagcccctgcagctcagcctttaagcctccattcatctcggaggtcagatcagccatacgccttcggatgagtgagactgcaggtcactctcacctgtgaaggtgagatccttgaagggaggggcttctggcccatagcacttctgtgctcccaacaaggaggcctgtccctttgacaccctggccaagtacagctccagggtcttgagcagaacccgtgggctcttcttggccaatacttccaactctgcaacagagagaattggggagcagaaggcttgagggggctctgggtgacacaacagtcaaggcctcaagcctagcagctctagggagtacccccaacccctatcccatggagagaaagtgaaggagcctcagatggagagatcaccagagaggtaggctagggagccagctacagccacagggaccacacactctaccttgtctgcacaattgcaactttgaatagtccaacta

SEQ ID NO: 266 - DNA, 1165 bp, Homo sapiens
gcaagtcttttttttttttttaataaaaccaacataacagaatgtagaaatctaaacgaacatttctccctcaaagtagttacatccttagctccaacaaaactactattgttggagacttatttagaactcctgtttgaggaaaggccttaaaaggtggtttatgagccacattagaaaatacccttctaaactttgggctgtttaaaaacagaaaatccatactcagaggatgacaccgagaaaattaaaaaggtgctgcagctctcacggaggttccctaaagacctctagcaagttctgagcaacagcatcaccattggagaaacgtgtagcctcccaggacagccactttccatgggacggcattcatttggatagaaaagttctgctgtctgtttaaaaagaaaaaagaaaaaaaaaaaatcagccacactcctttatagtcacacttgcatttgattaaaaaaaaaaacaacaacaacaacactcacacgtggttcttgtatgaattctaattaagagacattatattcagaattatagcactcatagtgataattttcagaagactataacagcttctttgccacttaaggggtacagagggtgcagctgtttacctgaatgaattcttaaataagtgactactaccactctaattttcctagttgtagctctgttacaggttactgaccgccaagtccatgttccagacattctttgccaacacagattaattacaagagagccacccccaaagtcttagggcgaattgggaaagggccggttaaatgaggaaacaggccattccttggtaaaagtttgtagttttctttcccaatacatcttctttttattgagaacttccatttttatcctgtgttcctcctctgccatctcacactctcgctctatctgctggattttggccacatgcacctcattcatttgtatcagttgcagttgtaagatggacatttgttgatggtgttcttcctcatgcatcttttttaaagcaccttcctgagaggttttgctcctgtagtttttattggctgttattctgacagctgaacacgagggttcaggttgagaggtcccctcacatactggaaaatgtatgaactctttctcatcatcgcacagttctctatttgaaaca

SEQ ID NO: 267 - DNA, 1551 bp, Homo sapiens
atttttcttcttccttgtaaataatttaaacagtatttatttttgtaaggcataactagaaactaaaatatattctaaaaaattcattattctgaacaaagtgatcaaattagaatacatatttttcaacagtggtagagcttttaatatatgtttattgaaagttatctataatacttgcaccagtgttgaaaaaagttaacatgtaggcaagagcaatatgtttgtctcaaggatttttccatggtttcctcagtgatggtgtcctgggattattcaggtggtgaccatcactggtctaagtttgtgtgcagggttttcagacgtgtttttgtgaaacttcgtagaaccatcgctaataaagaggacagtgttgtcagggtccatctgccctccatagaaaaatgtctctggctcataaaatgagactccctcaggggcgtaaatatgaactgacagcagtaactctgatacagaataatctaaattgcatcaaatggccttaattcagagtttgttaggcttatcagtatgttgcttttaattggggtgggaaagtagagggagagaaagcaagacatttattaagcacctcgtatgtgccaggcactatgctaagcactttacataagttaggattaatccctgcaagaatcctataaagaatgttactagcatttacacttcccaaatgaaggtaccaaagctcaaacgcaatgttgtgaagctgtttccttcagatttaggttatgtgggatgatgtgggattgaagaggaaagaaaggtgggattatccccctaggaagactttcaggcctgacttcataggaattcatccatcttatcatgtggagtttatctcaccctgctgttgcaggatgctatttgcatgtgtcaccaggtgatgttttttctttggggagtaggggtttggcttcctcattcatccctcttgctaaaagaggagatagttgatgttgcatctaaagatgctataagacaatgaaagtttgatgttgtacatacctacaagtaccatttttgtgcatgattacactccactgacatcttccaagtactgcatgtgattgaataagaaacaagaaagtgaccacaccaaagcctccctggctggtgtacagggatcaggtccacagtggtgcagattcaaccaccacccagggagtgcttgcagactctgcatagatgttgctgcatgcgtcccatgtgcctgtcagaatggcagtgtttaattctcttgaaagaaagttatttgctcactatccccagcctcaaggagccaaggaagagtcattcacatggaaggtccgggactggtcagccactctgacttttctaccacattaaattctccattacatctcactattggtaatggcttaagtgtaaagagccatgatgtgtatattaagctatgtgccacatatttatttttagactctccacagcattcatgtcaatatgggattaatgcctaaactttgtaaatattgtacagtttgtaaatcaatgaataaaggttttgagtgt

SEQ ID NO: 268 - DNA, 515 bp, Homo sapiens
taatgttaattaactttattcacatttttccaagtaaatacaatattaactataagctaaaaacaatacatagttcttagaaaatacaaccccgaattattgtgtggcctgggctttgtgattatgtgcccagcctttgttcctccagaattttaaagtgaatgcagtgctcaaaacaaacttacgatagcacagggaaaccttccctaaataaagttttgttattagaagagaaatccaaaaagaggcctctactgccttcattcaagtgtcgagaatttcaaaatggaaataatattaaaagagcaatcgatttttttccatctcacactagtaggcttgaaggaggcaaatttggaccaaaaatctagacatagctccttgcatagggtttgatattaagcacacacttgcactgaataactccatatccaccctatagtacaaaaattcatttcaaatgcaaacgttgtgcaatgaccaggtcatatttttaagatcactctttaaaatat

SEQ ID NO: 269 - DNA, 931 bp, Homo sapiens
caatttgttaaatgaaattgtattttgcccacggctgcttctgtttgatccctggggacagaggggagcaagggaggggagtggcagggggaggcccaggtgtggggctggagggggtactggcggcagcgggaggcagtaggcttgggcaggggaggagtgcgctgcgcctcaggaggcaaaggtgccccagcctgggcaggccctggaccagcccaagctgagcagcgccgcccctgggctggctctcagagcctgggctaacgtggagcccgccacgtcgcttggcactcagaggcccctgcttcttgttggctcacgtaggccacgctcaacacgtagcctgtgccacacccttcgaggcccgggtaggagggcagaggggctggtctgggctcttggtggacccctgctggtgctgcctgcctcctcctcccccacgtgggactcaagccaagggtcagaggcgcttccgctgctgggagcaagggaggagagtaggggtggagcagcctcccctctgcgtgggaacccggcctgtgtaagcagtagcgggacagggtggccggagtgatgccttggggcctgcggggaggagtggaagaagtggatgggctggctggctgtggcttgcatggcactggcagcccagcctggcttagaagtctggccggtccttcttcagcttcttatagtcagtggaaactgcaaggaacttgtattggtcattggggctcaggcggttccagggctccgggttgttctttctgtcccagcagacgtcggggctgcgaagggcgagtcgcagcaagtaaagcgcagcgctgcccatgcccaggcagattaagccgatcatcgggatgatccccggatgtcttttgatctgccggtagaagcgggccccaagactggctcctgccatatcgttgtt

SEQ ID NO: 270 - DNA, 450 bp, Homo sapiens
acagagtcttgaggaaatacatttctaagaaggatttttacagacactcatctttcatacccaaccacagggtctaactctaaagaggataaaaccaattactttcgtcccaagagctcatgactaatgacagcgtaaatctatgctatcaaaacctgcgtctctcatctgttacgagtattcaggcaggattcaaatattctcaaagaaagaaacacagtgcatgctgtgatcgcctgctcagcaacaacaagcactgcatcccaaactatctcctcccaggaattaaatgaggccagttgtgtacactggcatttcctccactgtggtactgcagaaggtctcagtgtcacaaagaatccttttgtcttctttaatatttatggtcacagctgtcttcccaagttgaccccgactgccagttcaacaagtcagtagcagtcaaaatat

SEQ ID NO: 271 - DNA, 449 bp, Homo sapiens
ctatcccattttttcatttatttttatgaggagcctcaaaaaatagaagtggccttggtagggaaggaatgtcgtgattctgagtacagtatggcaaattcttttgcctcagtttccctaactccatccagtgcatatgaaaatgtctatgtgcgtacaaggtaggtctggactaagctctggccctccggttgttttcccattgcgggagcctaagccagggtgcccaggactcctgtgtggctggtgggcctgatgcccacagctgatgattcaggaaggaggggcctggagtctgctgcagactctcccgccccctacagcccaaaccgggcactgcagcaatgaggtggtcagtccagggagaggtccgacaagttctcggcacaatgctgcaggaagtcaaagtcaggcacggagaagggcacgcgggaccactttttggcctg

SEQ ID NO: 272 - DNA, 859 bp, Homo sapiens
tttttttttttttttttttgagttgctgaaaagtttacttttgagttttaaactgtactttgaaaactatattgtgaactgtgttgacatgaggaaaggctgggctccctgaaaacatccagttccacagcagggcgtgcccaagcccagccaatccccaggcaatgcagggcagggatcccacctggtataagtacgggcagagggcagagcagggctgtatcgaggggcggcgctgggaccctcctcgcccagagttcctactcatccccagcacagaagtgctctgtagggccagctgaggacaccccggttcactgagggtggcccacagtaagtcgccgtctggcagtaagttagctctggcaggtgtggacccaagaccacacacagcctttctcaggtgcaggtcctccaagcctcacttcgcagtggtgacaggcaacccgtcagggcagggagcttccaaaggccagtccgagtccatgccaggcgtccactaaatctgcctctccctctccagcgagcaggtgcagccctcaactcctgcaggcctggggagcggagacagggcctgtaggctcggacacgacccggtcctgattttaacagtagacttgagaaggcaggctcagcagacaggctgctggaggatccacccgctgtctcccgcagcggccccactgaagcggcagaaacacacagaagcaccaaatctgtcactctcttcccgtaggaagtccccagaggtggccctccggaggatggtcctgttggctgaagatatgaccacacctgtgcctgcccagggccaccttcagcttggcaacaggaactccgcacactggtaccctgcgac

SEQ ID NO: 273 - DNA, 632 bp, Homo sapiens
aagaatgctaagatgatttcagatatcgaaaagaaaaggcagcgtatgattgaagtccaggatgaactgcttcggttagagccacagctgaaacaactacaaacaaaatatgatgaacttaaagagagaaagtcttcccttaggaatgcagcatatttcttatctaatttaaaacagctttatcaagattattcagatgttcaagctcaagaaccaaacgtaaaggaaacgtatgattcatccagccttccagctctgttatttaaagcaagaacacttctgggagccgaaagccatctgcgaaatatcaaccatcagttagagaagctccttgaccagggatgagaagagcagtctactaaaatgtgcctataggaagactagtctcatgctgttaccttctgaaactgtacctttataaatcaattgttttgcaaagaagttatggcctacttagaatctaaaatttgttattcaaattaaatggctgtgaacaatgttaaatagcatcagtttgtccaatagttttaaaggccataatcatcttttctggttaatatcttgagtaattttaaaatgttgacaccttaatcggtcccaggtatgagccataataaacttgtaaaattaag

SEQ ID NO: 274 - DNA, 21 bp, Art- Primer
gaguuuaccgaccaccaagtt

SEQ ID NO: 275 - DNA, 21 bp, Art-primer
ugcggaugccauucaguggtt

1. A purified protein comprising the C-terminal 60 contiguous amino acids of SEQ ID NO: 3, wherein said purified protein displays the antigenicity or immunogenicity of SEQ ID NO: 3.

2. The purified protein of claim 1, wherein said protein comprises the C-terminal 500 amino acids of SEQ ID NO: 3.

3. The purified protein of claim 1, wherein said protein comprises SEQ ID NO: 3.

4. The purified protein of claim 1, wherein said protein comprises amino acids 636-1110 of SEQ ID NO: 3.

5. The purified protein of claim 1 that consists of less than the entire amino acid sequence of SEQ ID NO: 3.

6. An isolated nucleic acid comprising 3750 contiguous nucleotides of SEQ ID NO: 1, or the complement thereof.

7. An isolated nucleic acid, wherein said isolated nucleic acid comprises 500 contiguous nucleotides of the 3′ end of SEQ ID NO: 1, or the complement thereof.

8. The isolated nucleic acid of claim 6, wherein said isolated nucleic acid comprises the nucleotide sequence of SEQ ID NO: 1, or the complement thereof.

9. The isolated nucleic acid of claim 6 that is DNA.

10. An isolated nucleic acid comprising a nucleotide sequence encoding the protein of claim 1 or claim 3, or the complement of said nucleotide sequence.

11. A cell transformed with a nucleic acid, said nucleic acid comprising (a) a nucleotide sequence encoding the protein of claim 1, or (b) the complement of said nucleotide sequence.

12. A recombinant cell containing the nucleic acid of claim 6, in which the nucleotide sequence is under the control of a promoter heterologous to the nucleotide sequence.

13. A recombinant cell containing a nucleic acid vector that comprises the nucleic acid of claim 6.

14. An antibody that specifically binds to a protein the amino acid sequence of which consists of SEQ ID NO: 3.

15. The antibody of claim 14 that is monoclonal.

16. A molecule comprising a fragment of the antibody of claim 14, which fragment binds said protein.

17. A method of producing a protein comprising:
growing a recombinant cell containing the nucleic acid of claim 10 in which said nucleotide sequence is under the control of a promoter heterologous to said nucleotide sequence, such that the protein encoded by said nucleic acid is expressed by the cell; and
recovering said expressed protein.

18. An isolated protein that is the product of the process of claim 17.

19. A pharmaceutical composition comprising a therapeutically effective amount of the protein of claim 1, and a pharmaceutically acceptable carrier.

20. A pharmaceutical composition comprising a therapeutically effective amount of the nucleic acid of claim 6; and a pharmaceutically acceptable carrier.

21. A pharmaceutical composition comprising a therapeutically effective amount of the nucleic acid of claim 6; and a pharmaceutically acceptable carrier.

22. A pharmaceutical composition comprising a therapeutically effective amount of the antibody of claim 14, and a pharmaceutically acceptable carrier.

23. A method of identifying an agent that modulates the binding of a protein comprising SEQ ID NO: 3 to a binding partner, comprising contacting said protein and said binding partner with an agent; and measuring an amount of a complex comprising said protein and said binding partner in the presence of said agent, wherein if said amount differs from said amount in the absence of said agent, said agent is identified as an agent that modulates the binding of said protein to said binding partner.

24. The method of claim 23, wherein said agent or said binding partner is purified.

25. A method of identifying a molecule that binds to a ligand, comprising:
(a) contacting a ligand with one or more candidate binding molecules under conditions conducive to binding between said ligand and said molecules, wherein said ligand is selected from the group consisting of a first protein comprising SEQ ID NO: 3, a second protein comprising a fragment of SEQ ID NO: 3 comprising the FH2 domain of DIAPH3 but less than all of SEQ ID NO: 3, and a nucleic acid encoding said first protein or said second protein; and
(b) identifying any of said molecules that specifically binds to said ligand.

26. The method of claim 25, wherein said molecule is an antibody.

27. The method of claim 25, wherein said molecule is a small molecule.

28. A method of diagnosing an individual as having breast cancer, comprising comparing the level of expression of a nucleic acid encoding SEQ ID NO: 3 in a sample derived from breast cells of said individual to a control level of said expression, and diagnosing said individual as having breast cancer if said level of expression of said nucleic acid encoding SEQ ID NO: 3 is higher than said control level of expression.

29. The method of claim 28, wherein said level of expression of a nucleic acid encoding SEQ ID NO: 3 is determined by hybridizing said nucleic acid with an oligonucleotide complementary and hybridizable to nucleotides 1-862, 2927-3045, or 3412-3929 of SEQ ID NO: 1, and determining the amount of said hybridization.

30. A method of diagnosing an individual as having breast cancer comprising comparing the level of a protein the amino acid sequence of which consists of SEQ ID NO: 3 in a sample derived from breast cells of said individual to a control level of said protein; and classifying said individual as having breast cancer if said level of said protein in said sample is higher than said control level of said protein.

31. A method of imaging a breast cancer tumor comprising:
(a) contacting cells of said tumor with an antibody that binds specifically to a protein the amino acid sequence of which consists of SEQ ID NO: 3, wherein said antibody is labeled; and
(b) detecting said label.

32. A method of predicting the prognosis of a breast cancer patient comprising:
(a) determining the level of expression of a nucleic acid encoding SEQ ID NO: 3 in a sample derived from breast cancer tumor cells from said patient;
(b) comparing said level of expression to a control level of said expression; and
(c) predicting that said patient will have a poor prognosis if said level of expression of said nucleic acid encoding SEQ ID NO: 3 in said sample is higher than said control level of said expression.

33. The method of claim 32, wherein said level of expression of a nucleic acid encoding SEQ ID NO: 3 is determined by hybridizing said nucleic acid with an oligonucleotide complementary and hybridizable to nucleotides 1-862, 2927-3045, or 3412-3929 of SEQ ID NO: 1, and determining the amount of said hybridization.

34. The method of claim 32, wherein said determining is carried out by a method comprising:
(a) hybridizing nucleic acids in said sample to an oligonucleotide, wherein said oligonucleotide is hybridizable to SEQ ID NO: 1 or its complement; and
(b) determining the amount of said hybridization.

35. The method of claim 33, wherein said oligonucleotide is a probe on a micro array.

36. The method of claim 33, wherein said oligonucleotide is one of a plurality of probes on a microarray, wherein said plurality comprises probes complementary and hybridizable to nucleic acids respectively encoded by five different breast cancer-related markers that do not encode SEQ ID NO: 3.

37. The method of claim 33, wherein said oligonucleotide is one of a plurality of probes on a microarray, wherein said plurality comprises probes complementary and hybridizable to nucleic acids respectively encoded by twenty different breast cancer-related markers that do not encode SEQ ID NO: 3.

38. The method of claim 36, wherein said five different breast cancer-related markers are present in Table 1.

39. The method of claim 36, wherein said five different breast cancer-related markers are present in Table 2.

40. A method of predicting the prognosis of a breast cancer patient comprising:
(a) determining the level of a protein comprising SEQ ID NO: 3 in a sample derived from breast cancer tumor cells from said patient;
(b) comparing said level of said protein to a control level of said protein; and
(c) predicting that said patient will have a poor prognosis if said level of said protein comprising SEQ ID NO: 3 is significantly higher than said control level of said protein.

41. The method of claim 40, wherein said determining is carried out by a method comprising:
(a) contacting said protein comprising SEQ ID NO: 3 from said sample with an antibody that specifically binds said protein; and
(b) determining the amount of antibody bound to said protein, wherein said amount of antibody bound to said protein indicates said level of said protein in said breast cancer tumor sample.

42. A kit comprising in a first container an oligonucleotide that hybridizes to SEQ ID NO: 1 under stringent conditions, wherein said oligonucleotide is at least 12 nucleotides in length, and wherein said oligonucleotide is complementary and hybridizable to nucleotides 1-862, 2927-3045, or 3412-3929 of SEQ ID NO: 1.

43. A kit for the diagnosis and/or prognosis of breast cancer, comprising in a first container an oligonucleotide that hybridizes to a nucleotide sequence that encodes SEQ ID NO: 3 under stringent conditions, wherein said oligonucleotide is at least 12 nucleotides in length, and wherein said oligonucleotide is complementary and hybridizable to nucleotides 1-862, 2927-3045, or 3412-3929 of SEQ ID NO: 1, and further comprising in a second container a known amount of a nucleic acid to which said oligonucleotide is complementary and hybridizable.

44. The kit of claim 43, wherein said oligonucleotide is a probe on a microarray.

45. The kit of claim 44, wherein said microarray comprises probes complementary and hybridizable to nucleic acids respectively encoded by five breast cancer-related markers other than a nucleotide sequence that encodes SEQ ID NO: 3.

46. An article of manufacture comprising a container comprising a purified protein comprising SEQ ID NO: 3.

47. A kit comprising in a first container an antibody that specifically binds to a protein the amino acid sequence of which consists of SEQ ID NO: 3, or specifically binds to a fragment of said protein, and further comprising in a second container a known amount of said protein or a fragment thereof to which said antibody binds.

48. A kit comprising in one or more containers a forward primer and a reverse primer that amplify at least a portion of the nucleotide sequence of SEQ ID NO: 1 when used in a polymerase chain reaction, wherein said forward primer and said reverse primer are complementary and hybridizable to nucleotides 1-862, 2927-3045, or 3412-3929 of SEQ ID NO: 1 or the complementary sequence thereof.

49. A method of inhibiting the expression of a nucleotide sequence encoding SEQ ID NO: 3 comprising contacting an RNA encoding SEQ ID NO: 3 with an interfering RNA, said interfering RNA comprising a nucleotide sequence complementary and hybridizable to SEQ ID NO: 1, under conditions that allow said interfering RNA and said mRNA to hybridize.

50. The method of claim 49, wherein the nucleotide sequence of said interfering RNA, or a complement thereof, is present within SEQ ID NO: 1.

51. The method of claim 49, wherein the nucleotide sequence of said interfering RNA is selected from the group consisting of SEQ ID NO: 274 and SEQ ID NO: 275.

52. The method of claim 23, wherein, said protein comprising SEQ ID NO: 3 is purified.

53. The method of claim 25, wherein said first protein or said second protein is purified.
